(19) United States
(12) Patent Application Publication
(10) Pub. No.: US 2023/0066882 A1
(43) Pub. Date: Mar. 2, 2023

(54) Stable Reporter Flavivirus

(71) Applicant: Board of Regents, the University of Texas System, Austin, TX (US)

(72) Inventors: Coleman Baker, Galveston, TX (US); Xuping Xie, Galveston, TX (US); Pei-Yong Shi, Galveston, TX (US)

(21) Appl. No.: 17/412,900

(22) Filed: Aug. 26, 2021

(51) Int. Cl. C12N 7/00; C12N 9/02

(52) U.S. Cl. CPC C12N 7/00; C12N 9/0069; C12N 2770/24121

(57) ABSTRACT

Certain embodiments are directed to a stable recombinant flavivirus nucleic acid having a heterologous reporter cassette, the reporter cassette having a 5′ end, a nucleotide segment encoding a reporter, and a 3′ end; the 5′ end of the reporter cassette encoding 25 to 38 amino acids of a flavivirus capsid protein; the 3′ end of the reporter cassette encoding 25 to 38 amino acids of a flavivirus capsid protein.

### STATEMENT REGARDING FEDERALLY FUNDED RESEARCH

[0001] This invention was made with government support under U19AI142759 awarded by the National Institutes of Health (NIH) and U01CK0000512 awarded by the Center for Disease Control (CDC). The government has certain rights in the invention.

### REFERENCE TO SEQUENCE LISTING

[0002] A sequence listing required by 37 CFR 1.821-1.825 is being submitted electronically with this application. The sequence listing is incorporated herein by reference.

### BACKGROUND

[0003] Viruses from the arthropod-borne genus Flavivirus afflict people across the globe causing febrile, neurologic, and hemorrhagic disease¹. Notable among the flaviviruses are the four serotypes of dengue virus (DENV), which cause an estimated 96 million symptomatic infections yearly², Japanese encephalitis virus (JEV) which causes the annual loss of 709,000 disability-adjusted life years³, the recently emerged Zika virus (ZIKV), which has become associated with congenital malformations⁴, and yellow fever virus (YFV), which periodically emerges from its sylvatic transmission cycle to start an urban transmission cycle⁵. Concerted efforts by scientists and clinicians have brought about vaccines for YFV, JEV, and DENV^{6,7} though effective antiviral drugs have yet to be approved. Reporter flaviviruses, first published in 2003⁸, have been critical for high-throughput antiviral compound screens^{9,10} host and virus pathogenesis studies ¹¹, and serological diagnosis ^{12,13} . Despite these advances, reporter flaviviruses suffer from genetic instability during longer periods of growth or passaging, thought to be primarily mediated by recombination^{14,15}.

[0004] Reporter genes are routinely engineered at the beginning of the single open reading frame of the viral polyprotein, between the 5′ UTR and the capsid gene, as first described using YFV ^{16.} RNA signals that aid in genome cyclization, which is essential for viral replication, and facilitate translation are continuous from the 5′ UTR into the beginning of the capsid. These signals must function together, therefore it is necessary to duplicate a portion of the capsid gene and place it upstream of the inserted reporter gene. Until recently, efforts to stabilize these constructs centered on reducing homology between the duplicated capsid sequences by codon scrambling in an effort to reduce homologous recombination^{16,17}. This also had the benefit of expunging the cis-acting elements in the full capsid sequence, leaving only the upstream elements. Two additional methods for stabilizing reporter flaviviruses have been newly developed, both focusing on blocking recombined reporter viruses from continued infection. Volkova and colleagues report a single-nucleotide insertion to the duplicated capsid portion of a reporter ZIKV that minimally perturbs critical RNA elements but causes a +1 frameshift¹⁸. If recombination occurs between the duplicated capsid sequences that flank the reporter gene, this frameshift mutation is incorporated into the viral polyprotein and causes mistranslation, effectively taking out recombined viruses from the population. We developed a related method for reporter ZIKV and YFV using recombination-dependent lethal mutations in the duplicated capsid¹⁹. These lethal mutations stop viral particle formation if recombination brings them into the viral polyprotein.

[0005] The length of capsid duplications in different flavivirus reporter constructs that have been reported varies from 25, to 33 or 34, 38, 50, or even the full capsid^{10,16-18,20-24} Shorter lengths are tolerated by some viruses and not by others. At the onset of this investigation, there was no published comparison of the effect of capsid duplication length and its effect on stability. It was believed that shorter capsid repeats were preferred because the shorter homologous sequence minimizes homologous recombination. It is hypothesized that an optimal length of capsid duplication is required for efficient viral replication; a shortened capsid duplication imposes a selection pressure on viral replication, leading to undesired recombination and deletion of the engineered reporter gene. The goal of this study is to test this hypothesis by engineering different lengths of capsid duplication and investigating the length effect on the stability of the reporter gene in various flaviviruses. Indeed, an optimal length of capsid duplication of 34 or 38 amino acids were identified that can increase the reporter gene stability for at least ten rounds of cell culture passages. Taking this new approach, the inventors have developed a panel of long-term stable NanoLuc-tagged flaviviruses, including the four serotypes of DENY, JEV, YFV, and ZIKV. In addition, it is demonstrated the reporter flaviviruses can be used for rapid antibody neutralization testing and antiviral drug discovery. Taken together, the results have established a previously unrecognized approach to generate stable reporter flaviviruses that are useful for research and countermeasure development.

### SUMMARY

[0006] Mosquito-transmitted flaviviruses cause widespread disease across the world and medical countermeasures have yet to be proven effective. To provide better molecular tools for drug screens and pathogenesis studies, a new approach to produce stable reporter-tagged flaviviruses, including dengue virus serotypes 1-4, Japanese encephalitis virus, yellow fever virus, West Nile virus, and Zika virus is described herein. Since the reporter gene is often engineered at the flaviviral capsid gene region, the capsid sequence must be duplicated to flank the reporter gene; such capsid duplication is essential for viral replication. The conventional approach for stabilizing reporter flaviviruses has been to shorten or modify the duplicated capsid sequence to minimize homologous recombination. No study has examined the effects of capsid duplication length on reporter virus stability. Described herein is the optimal length of capsid duplication (34 or 38 amino acids without any other modifications) that can stabilize reporter flaviviruses. NanoLuc-tagged flaviviruses were stable after ten rounds of cell culture passaging. Mechanistically, the optimal length of capsid duplication may contain all the cis-acting RNA elements required for viral RNA replication, thus reducing the selection pressure for recombination. Certain embodiments are directed to improved methods of constructing optimal reporter flaviviruses and the resultant reporter flaviviruses.

[0007] Certain embodiments are directed to a recombinant flavivirus encoding a polyprotein having an amino terminal reporter element comprising, amino to carboxy, a first C25 to C38 capsid element, a reporter, a 2A self-cleaving element (e.g., thosea asigna virus 2A, T2A), and a second C25 to C38 capsid element.

[0008] Certain embodiments are directed to a recombinant flavivirus comprising, consisting essentially of or consisting of a nucleic acid sequence that is at least 90, 95, 96, 97, 98, 99, to 100% identical to SEQ ID NO:13, 15, 17, 19, 21, 23, 25, 27, 29, or 31, and encoding a polyprotein having the amino acid sequence that is at least 90, 95, 96, 97, 98, 99, to 100% identical to SEQ ID NO:14, 16, 18, 20, 22, 24, 26, 28, 30, or 32, respectively.

[0009] SEQ ID NO:13 includes a reporter cassette including from 5′ to 3′ a first C25 element (nucleotides 107-181 encoding amino acids 1-25 of SEQ ID NO:14); a representative reporter (nanoLuc report nucleotides 181-694 encoding amino acids 26-196 of SEQ ID NO:14); a T2A element (nucleotides 695-757 encoding amino acids 197-217 of SEQ ID NO:14); and a second C25 element (nucleotides 758-832 encoding amino acids 218-242 of SEQ ID NO:14). The reporter cassette is in frame with the polyprotein.

[0010] SEQ ID NO:15 includes a reporter cassette including from 5′ to 3′ a first C38 element (nucleotides 107-220 encoding amino acids 1-38 of SEQ ID NO:16); a representative reporter (nanoLuc reporter nucleotides 221-733 encoding amino acids 39-209 of SEQ ID NO:16); a T2A element 734-796 encoding amino acids 210-230 of SEQ ID NO:16); and a second C38 element (nucleotides 797-910 encoding amino acids 231-268 of SEQ ID NO:16). The reporter cassette is in frame with the polyprotein.

[0011] SEQ ID NO:17 includes a reporter cassette including from 5′ to 3′ a first C38 element (nucleotides 95-208 encoding amino acids 1-38 of SEQ ID NO:18); a representative reporter (nanoLuc reporter nucleotides 209-721 encoding amino acids 39-209 of SEQ ID NO:18); a T2A element 722-784 encoding amino acids 210-230 of SEQ ID NO:18); and a second C38 element (nucleotides 785-898 encoding amino acids 231-268 of SEQ ID NO:18). The reporter cassette is in frame with the polyprotein.

[0012] SEQ ID NO:19 includes a reporter cassette including from 5′ to 3′ a first C38 element (nucleotides 97-210 encoding amino acids 1-38 of SEQ ID NO:20); a representative reporter (nanoLuc reporter nucleotides 211-723 encoding amino acids 39-209 of SEQ ID NO:20); a T2A element 724-786 encoding amino acids 210-230 of SEQ ID NO:20); and a second C38 element (nucleotides 787-900 encoding amino acids 231-268 of SEQ ID NO:20). The reporter cassette is in frame with the polyprotein.

[0013] SEQ ID NO:21 includes a reporter cassette including from 5′ to 3′ a first C38 element (nucleotides 95-208 encoding amino acids 1-38 of SEQ ID NO:22); a representative reporter (nanoLuc reporter nucleotides 209-721 encoding amino acids 39-209 of SEQ ID NO:22); a T2A element 722-784 encoding amino acids 210-230 of SEQ ID NO:22); and a second C38 element (nucleotides 785-898 encoding amino acids 231-268 of SEQ ID NO:22). The reporter cassette is in frame with the polyprotein.

[0014] SEQ ID NO:23 includes a reporter cassette including from 5′ to 3′ a first C38 element (nucleotides 103-216 encoding amino acids 1-38 of SEQ ID NO:24); a representative reporter (nanoLuc reporter nucleotides 217-729 encoding amino acids 39-209 of SEQ ID NO:24); a T2A element 730-792 encoding amino acids 210-230 of SEQ ID NO:24); and a second C38 element (nucleotides 793-906 encoding amino acids 231-268 of SEQ ID NO:24). The reporter cassette is in frame with the polyprotein.

[0015] SEQ ID NO:25 includes a reporter cassette including from 5′ to 3′ a first C25 element (nucleotides 119-193 encoding amino acids 1-25 of SEQ ID NO:26); a representative reporter (nanoLuc reporter nucleotides 194-706 encoding amino acids 26-196 of SEQ ID NO:26); a T2A element 707-769 encoding amino acids 197-217 of SEQ ID NO:26); and a second C25 element (nucleotides 770-844 encoding amino acids 218-242 of SEQ ID NO:26). The reporter cassette is in frame with the polyprotein.

[0016] SEQ ID NO:27 includes a reporter cassette including from 5′ to 3′ a first C38 element (nucleotides 119-232 encoding amino acids 1-38 of SEQ ID NO:28); a representative reporter (nanoLuc reporter nucleotides 233-745 encoding amino acids 39-209 of SEQ ID NO:28); a T2A element 746-808 encoding amino acids 210-230 of SEQ ID NO:28); and a second C38 element (nucleotides 809-922 encoding amino acids 231-268 of SEQ ID NO:28). The reporter cassette is in frame with the polyprotein.

[0017] SEQ ID NO:29 includes a reporter cassette including from 5′ to 3′ a first C34 element (nucleotides 96-197 encoding amino acids 1-34 of SEQ ID NO:30); a representative reporter (nanoLuc reporter nucleotides 198-710 encoding amino acids 35-205 of SEQ ID NO:30); a T2A element 711-773 encoding amino acids 206-226 of SEQ ID NO:30); and a second C34 element (nucleotides 774-875 encoding amino acids 227-260 of SEQ ID NO:30). The reporter cassette is in frame with the polyprotein.

[0018] SEQ ID NO:31 includes a reporter cassette including from 5′ to 3′ a first C33 element (nucleotides 97-195 encoding amino acids 1-33 of SEQ ID NO:32); a representative reporter (nanoLuc reporter nucleotides 196-708 encoding amino acids 34-204 of SEQ ID NO:32); a T2A element 709-771 encoding amino acids 205-225 of SEQ ID NO:32); and a second C33 element (nucleotides 772-870 encoding amino acids 226-258 of SEQ ID NO:32). The reporter cassette is in frame with the polyprotein.

[0019] Certain embodiments are directed to a recombinant flavivirus comprising a heterologous reporter cassette, the heterologous reporter cassette having a 5′ end, a nucleotide segment encoding a reporter, and a 3′ end; the 5′ end of the reporter cassette encoding 25 to 38 amino acids of an amino terminus of flavivirus capsid protein; the 3′ end of the reporter cassette encoding 25 to 38 amino acids of an amino terminus of the flavivirus capsid protein, wherein the recombinant flavivirus is stable. In certain aspects, the recombinant flavivirus further comprises a nucleic acid segment encoding a 2A self-cleaving sequence position immediately 3′ of the reporter and immediately 5′ of the nucleotide segment encoding the second 25 to 38 amino acids of a flavivirus capsid protein. The 2A self-cleaving segment can be a T2A segment. In certain aspects, the flavivirus is a Dengue virus, Zika virus, or Japanese encephalitis virus. The reporter can be, but is not limited to a NanoLuc, EGFP, mCherry, mScarlet, mNeonGreen, or Renilla Luciferase reporter. In other aspects, the recombinant flavivirus has a nucleic sequence that is at least 98% to 100% identical to SEQ ID NO:13, 15, 17, 19, 21, 23, 25, 27, 29, or 31. In certain aspects the recombinant flavivirus encodes a polyprotein that is at least 95% to 100% identical to the amino acid sequence of SEQ ID NO:14, 16, 18, 20, 22, 24, 26, 28, 30, or 32.

[0020] Certain embodiments are directed to a recombinant flavivirus polyprotein comprising an amino terminal segment comprising a heterologous reporter, the reporter being flanked by an amino terminal first capsid segment corresponding to capsid segment comprising 25 to 38 amino terminal amino acids of the flavivirus capsid protein and a carboxy terminal second capsid segment corresponding to a capsid segment comprising 25 to 38 amino of the amino terminus of the flavivirus capsid protein. The polyprotein can further comprise a 2A self-cleaving segment between the reporter and the second capsid segment.

[0021] Other embodiments of the invention are discussed throughout this application. Any embodiment discussed with respect to one aspect of the invention applies to other aspects of the invention as well and vice versa. Each embodiment described herein is understood to be embodiments of the invention that are applicable to all aspects of the invention. It is contemplated that any embodiment discussed herein can be implemented with respect to any method or composition of the invention, and vice versa. Furthermore, compositions and kits of the invention can be used to achieve methods of the invention.

[0022] The use of the word “a” or “an” when used in conjunction with the term “comprising” in the claims and/or the specification may mean “one,” but it is also consistent with the meaning of “one or more,” “at least one,” and “one or more than one.”

[0023] Throughout this application, the term “about” is used to indicate that a value includes the standard deviation of error for the device or method being employed to determine the value.

[0024] The use of the term “or” in the claims is used to mean “and/or” unless explicitly indicated to refer to alternatives only or the alternatives are mutually exclusive, although the disclosure supports a definition that refers to only alternatives and “and/or.”

[0025] As used in this specification and claim(s), the words “comprising” (and any form of comprising, such as “comprise” and “comprises”), “having” (and any form of having, such as “have” and “has”), “including” (and any form of including, such as “includes” and “include”) or “containing” (and any form of containing, such as “contains” and “contain”) are inclusive or open-ended and do not exclude additional, unrecited elements or method steps.

[0026] As used herein, the terms “comprises,” “comprising,” “includes,” “including,” “has,” “having,” “contains”, “containing,” “characterized by” or any other variation thereof, are intended to encompass a non-exclusive inclusion, subject to any limitation explicitly indicated otherwise, of the recited components. For example, a chemical composition and/or method that “comprises” a list of elements (e.g., components or features or steps) is not necessarily limited to only those elements (or components or features or steps), but may include other elements (or components or features or steps) not expressly listed or inherent to the chemical composition and/or method.

[0027] As used herein, the transitional phrases “consists of and “consisting of exclude any element, step, or component not specified. For example, “consists of or “consisting of used in a claim would limit the claim to the components, materials or steps specifically recited in the claim except for impurities ordinarily associated therewith (i.e., impurities within a given component). When the phrase “consists of or “consisting of appears in a clause of the body of a claim, rather than immediately following the preamble, the phrase “consists of or “consisting of limits only the elements (or components or steps) set forth in that clause; other elements (or components) are not excluded from the claim as a whole.

[0028] As used herein, the transitional phrases “consists essentially of and “consisting essentially of are used to define a chemical composition and/or method that includes materials, steps, features, components, or elements, in addition to those literally disclosed, provided that these additional materials, steps, features, components, or elements do not materially affect the basic and novel characteristic(s) of the claimed invention. The term “consisting essentially of occupies a middle ground between “comprising” and “consisting of′.

[0029] Other objects, features and advantages of the present invention will become apparent from the following detailed description. It should be understood, however, that the detailed description and the specific examples, while indicating specific embodiments of the invention, are given by way of illustration only, since various changes and modifications within the spirit and scope of the invention will become apparent to those skilled in the art from this detailed description.

### DESCRIPTION OF THE DRAWINGS

[0030] The following drawings form part of the present specification and are included to further demonstrate certain aspects of the present invention. The invention may be better understood by reference to one or more of these drawings in combination with the detailed description of the specification embodiments presented herein.

[0031] FIGS. 1A-D. Panel of Reporter Flaviviruses. FIG. 1A. Scheme of NanoLuc insertion in the flavivirus genome. The duplicated capsid portion varies from 25 to 38 amino acids, depending on the virus. The white beginning of the capsid gene indicates the codon scrambling to reduce homology with the duplicated portion. FIG. 1B. Virus, corresponding number of capsid amino acids duplicated, and representative IFA images from Day 1 to 3 post electroporation. The pan-flavivirus envelope antibody 4G2 was used to probe for virus and cells were counterstained with DAPI. FIG. 1C. Focus-forming assay after 4-day infection on Vero cells. FIG. 1D. Genetic stability results after two independent series of ten passages in Vero cells. Viral RNAs from each passage were used as templates in an RT-PCR reaction with primers that spanned the 5′ UTR to the capsid. Full-length band sizes are as follows ZIKV: 1,162 bp; DENV1: 1,086 bp; DENV2: 1,128 bp; DENV3: 1,126 bp; DENV4: 1,131 bp; YFV: 1,282 bp; JEV: 1,360 bp.

[0032] FIGS. 2A-C. Extended Capsid Duplication. FIG. 2A. Virus, corresponding number of duplicated capsid amino acids, and representative Day 1 to Day 3 IFA images. The anti-flavivirus envelope antibody 4G2 was used. FIG. 2B. Focus-forming assay on Vero cells after four-day infection. FIG. 2C. Reporter gene retention after ten passages on Vero cells. RT-PCR products covering the reporter gene are shown for the two independent passaging series. ZIKV C50 passaging was discontinued after P2 due to loss of reporter gene. Band sizes corresponding to the full-length reporter gene are as follows ZIKV C38: 1,201 bp; ZIKV C50: 1,237 bp; YFV C38: 1,321 bp.

[0033] FIGS. 3A-C. Effect of Capsid Duplication Length on Viral Growth. Multi-step growth kinetics (MOI 0.01, n=3) on Vero cells, using focus-forming assay to quantify growth for FIG. 3A. ZIKV C25, C38, and C50; FIG. 3B. YFV C25 and C38; C. DENV1-4 and JEV. 2-way repeated measures ANOVA with Tukey's multiple comparisons test was used to assess significance for FIG. 3A and FIG. 3C. 2-way repeated measures ANOVA with Sidak's multiple comparisons test was used for FIG. 3B (p>0.5=ns, p<0.5=*, p<0.1=**, p<0.01=***, p<0.001=****).

[0034] FIGS. 4A-4C Neutralization and Antiviral Assays. FIG. 4A. NT5o values of a panel of mouse sera tested with the stable reporter viruses. For ZIKV and YFV NT50 tests, the C38 virus was used in both instances. FIGS. 4D-E. EC5o results from testing NITD008 against the panel of stable reporter viruses in both graphical and table formats, respectively.

[0035] FIGS. 5A-B. ZIKV C38 Nano in Mosquitoes. FIG. 5A. Aedes aegypti mosquitoes were micro-injected with 50 FFU ZIKV C38 Nano (n=30 per day). On days 8, 12, and 18, whole mosquitoes were collected and individually homogenized in PBS. Samples were analyzed by both qPCR (left panel) or luciferase assay (right panel). FIG. 5B. Aedes aegypti mosquitoes (n=50 per group) were inoculated by membrane blood-feeding on sheep's blood spiked with 2×10⁶ FFU/mL ZIKV C38 Nano. Mosquitoes were then analyzed as in panel FIG. 5A. For the luciferase assay, clean (uninfected) mosquitoes were used as a control. Values for luciferase activity are reported relative to background (no mosquito) levels. ANOVA with Tukey's post-hoc test was used to assess significant differences in all panels (p>0.5=ns, p<0.5=*, p<0.1=**, p<0.01=***, p<0.001=****).

[0036] FIGS. 6A-B. In vitro ligation scheme for DENV3 (FIG. 6A) and DENV4 (FIG. 6B).

[0037] The nucleotide positions of each fragment junction are indicated in red according to GenBank accession numbers EU482459 and FN429920, respectively.

[0038] FIGS. 7A-B. FIG. 7A. Capsid duplication length of WNV along with IFA images stained with 4G2 and DAPI. FIG. 7B. Stability results of passaged WNV-Nano, full length size 1,140 bp

[0039] FIGS. 8A-B. FIG. 8A. Scheme for passaging reporter viruses. PO is used to denote viral stock recovered after electroporation. 500₁1.1_, of PO was used to inoculate a T75 flask of confluent Vero cells. Infection was allowed to proceed until cell death was observed. This was repeated until P10 virus was obtained. Viral RNA was obtained from each passage and used in an RT-PCR reaction that bridged the reporter gene. These products were run on an agarose gel to observe band size. FIG. 8B. Focus-forming assay using WT ZIKV on Vero cells after a 4-day infection.

[0040] FIG. 9. Growth kinetics comparison of ZIKV C38 and WT ZIKV on Vero cells (MOI 0.01, n=3). Significant differences were assessed with 2-way repeated measures ANOVA with Sidak's multiple comparisons test (p>0.5=ns, p<0.5=*, p<0.1=**, p<0.01=***, p<0.001=****). Data for ZIKV C38 is the same as shown in FIG. 3A.

### DESCRIPTION

[0041] The following discussion is directed to various embodiments of the invention. The term “invention” is not intended to refer to any particular embodiment or otherwise limit the scope of the disclosure. Although one or more of these embodiments may be preferred, the embodiments disclosed should not be interpreted, or otherwise used, as limiting the scope of the disclosure, including the claims. In addition, one skilled in the art will understand that the following description has broad application, and the discussion of any embodiment is meant only to be exemplary of that embodiment, and not intended to intimate that the scope of the disclosure, including the claims, is limited to that embodiment.

[0042] Flavivirus reporter constructs have been notoriously unstable since they were first reported¹⁴′³³. Improvements in design¹⁶ have increased the stability, but previous efforts have fallen short of the high standard of ten passages. Here is described a panel of reporter flaviviruses, e.g., NanoLuc-tagged flaviviruses, with stability to at least ten passages in cell culture, which is double the passages routinely reported. It was found that C38 ZIKV and YFV reporter viruses were more stable than their C25 counterparts, and in the case of ZIKV, C38 had a distinct replication advantage. Previous hypotheses for constructing reporter flaviviruses assumes that shorter capsid duplication lengths would be more stable, due to a shorter stretch of homologous sequence. These results challenge that assumption, suggesting that C38 is optimal. The establishment of a stable reporter virus system will greatly facilitate the production of reporter virus in cell culture through viral infection and amplification rather than transfection of viral RNA transcribed from its infectious cDNA plasmid. The ease of stable reporter virus production enables potential high-throughput flavivirus neutralization testing and antiviral screening, as recently demonstrated for reporter SARS-CoV-2³⁴′³⁵.

[0043] Many different cis-acting elements present in the flavivirus capsid coding region have been mapped, including the 5′ cyclization sequence (CS)³⁶, the capsid hairpin (cHP)³⁷, the 5′ downstream of AUG region (DAR)³⁸, and the downstream of 5′ cyclization sequence pseudoknot (DCS-PK)³⁹. These elements work together to regulate RNA translation, genome cyclization, and viral replication. C25 includes all of those elements except the full DCS-PK, a pseudoknot that has been modeled in various flavivirus genomes, including ZIKV⁴⁰, and experimentally been found to aid viral replication in DENV2⁴¹ and DENV4³⁹. Extending C25 to C38 includes the full DCS-PK, which may explain the increased replication capacity of ZIKV C38 compared to ZIKV C25. We hypothesize that the lack of the DCS-PK in ZIKV C25 caused increased selective pressure and helped drive recombination. Inclusion of DCS-PK in ZIKV C38 lessened this selective pressure, expanding its stability. In contrast, YFV C38 replicated very similarly to YFV C25, supporting a model that YFV lacks, or has a shortened, DCS-PK³⁹. Despite this, the lengthened capsid duplication still had a positive effect on YFV stability.

[0044] Previous work with reporter ZIKV identified C50 as an optimal length for capsid duplication in relation to replication but its effect on stability was not independently tested¹⁸. C38 performed remarkably better in both stability and viral replication when compared to C50. The discrepancy could be due to different ZIKV strains, different sequences flanking the reporter gene, and the absence of a frameshift mutation which was included to help block recombination. ZIKV C50 includes the DCS-PK, along with the other required replication elements and as such would be expected to replicate similar to ZIKV C38. The extra capsid amino acids C39-050, which contain residues shown to be important in capsid dimerization⁴², could allow the C50 capsid fragment to interfere with full-length capsid, thus explaining the attenuation of C50 compared to C38. This selective pressure, along with a larger region for possible recombination, could also be driving the poor stability seen during passaging.

[0045] The inventors used sera from known virus-infected mice to demonstrate the utility of the reporter virus for neutralization testing. The reporter virus neutralization assay has been optimized in a 96-well format for high-throughput testing. For clinical use of the reporter neutralization testing, the assay can be validated using patient sera with well-defined viral infections. The validation can be achieved by comparing the antibody neutralizing titers derived from the conventional plaque reduction neutralization test (PRNT) with those derived from the reporter virus assay.

[0046] Together, these results demonstrate that extending the portion of capsid duplicated to make ZIKV and YFV reporter viruses can increase their stability and in the case of ZIKV enhance its replication capabilities in mammalian cells and whole mosquitoes. These data help inform a new generation of stable flavivirus reporter constructs to be used for high-throughput drug screens, serological diagnosis, pathogenesis studies, and transgene delivery.

### I. FLAVIVIRUS

[0047] The genus Flavivirus is a genera of the Flaviviridae family and includes the viral groups of Yellow Fever virus group, Tick-borne encephalitis virus group, Rio Bravo Group, Japanese encephalitis Group, Tyuleniy Group, Ntaya Group, Uganda S Group, Dengue Group, and Modoc Group. Members of the Flavivirus genus may produce a wide variety of disease states, such as fever, arthralgia, rash, hemorrhagic fever, and/or encephalitis. The outcome of infection is influenced by both the virus and host-specific factors, such as age, sex, genetic susceptibility, and/or pre-exposure to the same or a related agent. Some of the various diseases associated with members of the genus Flavivirus are yellow fever; dengue fever; and West Nile, Japanese, and St. Louis encephalitis. For a review of Flaviviruses see Burke and Monath (Flaviviruses. 1043-1125. In: Knipe DM., Howley PM. Field's Virology Fourth Edition Volume 1, 2001. Lippincott Williams and Wilkins, Philadelphia Pa.).

[0048] Virions of the Flaviviridae generally contain one molecule of a linear positive-sense single stranded RNA genome of approximately 10,000-11,000 nucleotides that replicates in the cytoplasm of an infected cell. Typically the 5′ end of the genome has a cap and the 3′ end that may or may not have a poly (A) tract. Some members of the genus Flavivirus are transmitted by a vector such as an insect, in many cases the insect is a mosquito.

[0049] The viral genome of the Flavivirus genus is translated as a single polyprotein and is subsequently cleaved into mature proteins. The proteins encoded by the virus typically consist of structural and non-structural proteins. Generally, there are three structural proteins that typically include the envelope protein (E protein) (amino acids 275-787 of GenBank accession number NP 041724, incorporated herein by reference), the core or capsid protein (C) (amino acids 1-92 of GenBank accession number NP 041724), and the pre-membrane protein (preM)(amino acids 105-223 of GenBank accession number NP 041724) (Yamshchikov et al., Virology 281, 294-304, 2001, incorporated herein by reference). The envelope protein is approximately 496 amino acids with an approximate molecular weight of 50 kDa and is often glycosylated. The envelope protein typically contains twelve conserved cysteine residues that form six disulfide bridges. The core protein is approximately 13 kDa and is rich in arginine and lysine residues. The pre-membrane protein is approximately 10 kDa and is cleaved during or after release of the virus from infected cells. A cleavage product of the prM protein remains associated with the virion and is approximately 8 kDa and is termed the membrane protein (M). Typically, it is the carboxy terminus of prM that remains associated with the virus particle as the M protein.

[0050] Various members of the Flaviviridae family are available through the American Type Culture Collection (Manassas Va.) under the following ATCC numbers: Dengue type 1 (VR-71), Ilheus (VR-73), Japanese encephalitis (VR-74), Murray Valley encephalitis (VR-77), Ntaya (VR-78), St. Louis encephalitis (VR-80), Uganda S (VR-81), West Nile (VR-82), Zika (VR-84), Dengue type 4 (VR-217), Dengue type 2 (VR-222), Japanese encephalitis (VR-343), Dengue type 1 (VR-344), Dengue type 2 (VR-345), Edge hill (VR-377), Entebbe bat (VR-378), Kokobera (VR-379), Stratford (VR-380), Tembusu (VR-381), Dakar bat (VR-382), Ntaya (VR-78), Banzi (VR-414), Modoc (VR-415), Rio Bravo virus (VR-416), Cowbone ridge (VR-417), Bukalasa (VR-418), Montana myotis leukoencephalitis (VR-537), Bussuquara (VR-557), Sepik (VR-906), Cowbone ridge (VR-1253), Dengue type 2 (VR-1255), Dengue type 3 (VR-1256), Dengue type 4 (VR-1257), Ilheus (VR-1258), Rio Bravo virus (VR-1263), St. Louis encephalitis (VR-1265), West Nile (VR-1267), Dengue type 4 (VR-1490), West Nile (VR-1507), and West Nile (VR-1510), each of which is incorporated herein by reference.

[0051] Examples of flaviviruses include, but are not limited to, Dengue, Japanese Encephalitis virus, West Nile Virus, Yellow Fever Virus, Tick-borne Encephalitis Virus, and the like. Additional examples of flaviviruses include, but are not limited to, Gadgets Gully virus (GGYV), Kadam virus (KADV), Kyasanur Forest disease virus (KFDV), Langat virus (LGTV), Omsk hemorrhagic fever virus (OHFV), Powassan virus (POWV), Royal Farm virus (RFV), Tick-borne encephalitis virus (TBEV), Louping ill virus (LIV), Meaban virus (MEAV), Saumarez Reef virus (SREV), Tyuleniy virus (TYUV), Aroa virus (AROAV), Dengue virus (DENV), Kedougou virus (KEDV), Japanese encephalitis virus group, Cacipacore virus (CPCV), Koutango virus (KOUV), Japanese encephalitis virus (JEV), Murray Valley encephalitis virus (MVEV), St. Louis encephalitis virus (SLEV), Usutu virus (USUV), West Nile virus (WNV), Kunjin virus, Yaounde virus (YAOV), Kokobera virus (KOKV), Ntaya virus group, Bagaza virus (BAGV), Ilheus virus (ILHV), Israel turkey meningoencephalomyelitis virus (ITV), Ntaya virus (NTAV), Tembusu virus (TMUV), Zika virus (ZIKV), Banzi virus (BANV), Bouboui virus (BOUV), Edge Hill virus (EHV), Jugra virus (JUGV), Saboya virus (SABV), Sepik virus (SEPV), Uganda S virus (UGSV), Wesselsbron virus (WESSV), Yellow fever virus (YFV), Entebbe bat virus (ENTV), Yokose virus (YOKV), Apoi virus (APOIV), Cowbone Ridge virus (CRV), Jutiapa virus (JUTV), Modoc virus (MODV), Sal Vieja virus (SVV), San Perlita virus (SPV), Rio Bravo virus group, Bukalasa bat virus (BBV), Carey Island virus (CIV), Dakar bat virus (DBV), Montana myotis leukoencephalitis virus (MMLV), Phnom Penh bat virus (PPBV), and Rio Bravo virus (RBV). Many flavivirus can also include different serotypes. For example, Dengue virus has at least four known serotypes, which include, but are not limited to, DENV1, DENV2, DENV3, and DENV4.

[0052] The flavivirus nucleic acid sequences described herein can also be included in genetic constructs, nucleic acid constructs, or expression constructs. As used herein, the terms “genetic construct,” “nucleic acid construct,” and “expression construct” are used interchangeably and refer to the DNA or RNA molecules that comprise a nucleotide sequence which encodes one or more proteins. The coding sequence, or “encoding nucleic acid sequence,” includes initiation and termination signals operably linked to regulatory elements including a promoter and polyadenylation signal capable of directing expression in a host cell or a cell of an individual to whom the nucleic acid molecule is administered.

[0053] As used herein, the term “expressible form” refers to nucleic acid constructs that contain the necessary regulatory elements operably linked to a coding sequence that encodes a protein such that when present in a host cell, the coding sequence will be expressed.

[0054] In some embodiments, the present invention provides a nucleic acid sequence encoding a replicon of a flavivirus. In some embodiments, a nucleic acid sequence encoding a replicon of the flavivirus comprises a flavivirus genome capable of self-replication. The nucleic acid molecule can be either DNA or RNA. In some embodiments, the nucleic acid sequence is free of RNA bases. In some embodiments, the DNA encoding the replicon is a plasmid. In some embodiments, the DNA is free of a virus or is not packaged in a virus. In other embodiments the nucleic acid is package in virus particle.

[0055] In certain aspects, any replicon can be used. A nucleic acid molecule that codes for all the proteins necessary for its replication in a cell is termed a “replicon”. Various types of replicons can be used including, but not limited to, a plasmid carrying a DNA-based version of a replicon that could be transfected into a cell directly (rather than an RNA transcript from the DNA) has been described for West Nile virus (Pierson, et al. (2005), Virology). Replication-competent clones of West Nile virus have also been described that carry a green fluorescent protein (GFP) reporter virus (Pierson, et al. (2005), Virology, 334:28-40). In some embodiments, the DENV replicon is the replicon described and used in Ansarah-Sobrinho et al. (2008), Virology 381, 67-74. In some embodiments, the replicon is a DENV2 replicon. In some embodiments, the replicon is a DENV1, DENV3, or a DENV4 replicon.

[0056] The nucleic acid sequences described herein and throughout can comprise a promoter operably linked to the nucleic acid sequence encoding one or more proteins. The proteins can be, but not limited to, C, prME and/or the replicon of the flavivirus. The promoter can be any promoter, including but not limited to promoters that are functional in eukaryotic cells. In some embodiments, the promoter is specifically functional in a eukaryotic cell. In some embodiments, the promoter is, but not limited to a CMV promoter, SV40, and the like. In some embodiments, the promoter is an inducible promoter. In other embodiments the promoter(s) are flavivirus promoter(s).

[0057] The nucleic acid sequence encoding replicons and the resulting replicons of the present invention can also comprise a reporter such that one can monitor the replication or expression of the genes found in the nucleic acid sequence of the replicon. The reporter can also be used to measure infectivity of any virus or virus-like particle that contains the replicon. Examples of reporters include, but are not limited to, a fluorescent reporter or an enzymatic reporter. Examples of enzymatic reporters include, but are not limited to, a luciferase reporter, (3-Galactosidase reporter, alkaline phosphatase reporter, chloramphenicol acetyltransferase (CAT), and the like. Examples of fluorescent reporters include, but are not limited to GFP (green fluorescent protein) reporter, RFP (red fluorescent protein) reporter, YFP (yellow fluorescent protein) reporter, nsTGP, and the like. Examples of luciferase reporters include, but are not limited to nano-Luc reporter, renilla luciferase reporter and firefly luciferase reporter. In some embodiments the replicon comprises a gene that allows for selection of a cell that comprises the replicon. In certain embodiment a reporter polypeptide comprises, consists essentially of, or consists of an amino acid sequence of SEQ ID NO:2, 4, 6, 8, 10, or 12. In certain aspects, the reporter and can be a protein having 95, 96, 97, 98, 99, or 100% identity to SEQ ID NO:2, 4, 6, 8, 10, or 12. In other aspects, the reporter can comprise 1, 2, 3, 4, 5, 6, 7, 8, 9, 10, 11, 12, 13, 14, 15, 16, 17, 18, 19, or 20 amino acid substitutions to the amino acid sequence of SEQ ID NO:2, 4, 6, 8, 10, or 12 as long as he operability of the protein as a reporter is not compromised. For example, a cell can be selected for comprising the nucleic acid sequence encoding the replicon by contacting the cell with a drug or chemical that because of the presence of the replicon the cell is resistant to the drug or chemical whereas cells that do not contain the replicon will die. Accordingly, in some embodiments, the nucleic acid sequence encoding the replicon comprises a drug resistant gene that allows a cell to escape the effects of drug or chemical. Examples of markers that can be used include, but are not limited to, zeomycin, and the like. Zeocin (zeomycin) is a member of the bleomycin antibiotic family. One could also use hygromycin, neomycin, blasticidin, puromycin, or mycophenolic acid resistance markers and antibiotics and the like as selection markers.

[0058] The present invention also provides methods of producing flavivirus reporter virus particles (RVPs). A reporter virus particle is a particle that comprises elements of a virus which are produced from a cell comprising a replicon and comprising any other elements necessary for the generation of the virus or virus-like particle. The RVP also comprises a reporter gene. The presence of the reporter gene can be used to monitor the particle's assembly, replication, infection ability, and the like.

[0059] In some embodiments, a method of producing flavivirus RVPs comprises contacting a cell with a nucleic acid sequence encoding a replicon. In some embodiments, the nucleic acid molecule encoding a replicon comprises a DNA molecule that encodes an RNA sequence. The RVPs are then produced once the cell has taken up the replicon. The nucleic acid sequence can be any sequence described herein.

[0060] The nucleic acid molecule encoding the replicon can be contacted with the cell in any manner that enables the nucleic acid molecule encoding the replicon to enter the cell or to be transfected into the cell. Examples of methods of contacting a nucleic acid molecule encoding the replicon with a cell includes, but are not limited to, calcium phosphate transfection, lipid-mediated transfection, PEI-mediated transfection, electroporation, infection with a virus coding for the replicon, and the like.

[0061] In some embodiments, the cell that is contacted with the nucleic acid encoding a replicon comprises elements that can express the structural elements of the flavivirus such that when the replicon is expressed in the cell in conjunction with the structural elements, a RVP is produced. In some embodiments, the structural elements are stably expressed in the cell. Examples of structural elements that can be present in the producer cell include, but are not limited to, Capsid (C), pre-membrane protein (prM), Envelope protein (E), or combinations thereof.

[0062] In some embodiments the structural proteins are under control of an inducible promoter such that the expression is regulated by the presence or absence of a compound or other type of molecule. Any inducible promoter can be used. Examples of inducible promoters include, but are not limited to, tetracycline (TREx, Invitrogen), Rheoswitch (NEB), Ecdyson (Invitrogen, Stratagene), Cumate (Qbiogene), glucocorticoid responsive promoter, and the like.

[0063] The present invention also provides compositions comprising flavivirus reporter virus particles and a storage buffer. The storage buffer is any buffer that allows the flavivirus reporter virus particles to be stored (e.g. frozen or refrigerated) for a period of time and the falvivirus reporter virus particles maintain their ability to infect a flavivirus susceptible cell (e.g. a cell that can be infected by a flavivirus virus or RVP). In some embodiments, the storage buffer is maintained at a pH of about 7.5 to about 8.5.

[0064] The present invention also provides a method of identifying a compound that can inhibit flavivirus infection. In some embodiments, the method comprises contacting a cell with a flavivirus described herein in the presence or absence of a test compound and determining if the flavivirus infects the cell in the presence and absence of a test compound. If the flavivirus infects the cell in the absence of the test compound, but not in the presence of the test compound, the test compound is said to be a compound that inhibits or modulates infection. The test compound that can inhibit flavivirus infection can be any type of compound or molecule including, but not limited to, a small organic molecule, small peptides, fusions of organic molecules and peptides, and the like.

[0065] The present invention also provides methods of identifying a compound that inhibits flavivirus assembly comprising contacting a flavivirus producer cell with a test compound and determining if the flavivirus can assemble in the presence of said test compound. A compound that inhibits assembly can be any compound including but not necessarily limited to small organic compounds, peptides, complete antibodies, any portion of antibody, or fusion compounds of any combination thereof

[0066] As used herein “codon optimized,” refers to a nucleic acid sequence that has been modified where the one or more modification results in increased protein expression as compared to the unmodified nucleic acid sequence. Codon optimization also refers to where a nucleic acid sequence is modified that results in enhanced expression in a eukaryotic cell by replacing one or more codons of the native sequence with codons that are more frequently or most frequently used in the genes of the eukaryotic cell. Various species exhibit particular bias for certain codons of a particular amino acid. In some embodiments, the increase in expression (e.g. protein expression) is at least 10%, 20%, 30%, 40%, 50%, 60%, 70%, 80%, 90% more than the non-optimized sequence. In some embodiments, the increase in expression is at least 100%, 200%, 300%, 400% or 500% more than the non-optimized sequence. The comparison can be made using any technique. The unmodified nucleic acid sequence can also be referred to as the wild-type sequence or a sequence that is found in nature.

[0067] Most amino acids are encoded by multiple synonymous codons. Different organisms use synonymous codons with different frequencies, a phenomenon known as codon bias. Preferred codon usage has been identified as an important factor in the efficiency of both prokaryotic and eukaryotic gene expression (Gustafsson et al., Trends in Biotechnology 22(7), 2004). The presence of infrequently used codons in messenger RNAs can result in decreased expression of exogenous genes. This is especially true for the expression of viral genes, which are often A-T rich and encode cis-acting negative regulatory sequences (Gustafsson et al., Trends in Biotechnology 22(7), 2004).

[0068] Codon optimization is a methodology used to improve heterologous protein expression by altering the codon usage of target genes. Codon optimization introduces silent nucleotide changes to remove rare codons and replace them with more commonly used codons that reflect the codon bias of a given host cell. Additionally, codon optimization employs computer algorithms to analyze gene sequences for silent nucleotide changes that can improve a variety of important factors involved in different stages of protein expression including mRNA secondary structure, mRNA nuclear export, and translational cis-elements. Codon optimization of several viral genes, including the E5 gene of human papillomavirus (HPV) and the U51 gene from human herpesvirus (HHV), results in enhanced protein expression in mammalian cells (Disbrow et al., Virology 311, 2003; Bradel-Tretheway et al., Journal of Virological Methods 111, 2003).

[0069] The present invention also provides host cells and isolated cells comprising any nucleic acid molecule described herein.

[0070] In some embodiments, the present invention provides flavivirus or flavivirus particles comprising the nucleic acid molecules described herein.

### II. EXAMPLES

[0071] The following examples as well as the figures are included to demonstrate preferred embodiments of the invention. It should be appreciated by those of skill in the art that the techniques disclosed in the examples or figures represent techniques discovered by the inventors to function well in the practice of the invention, and thus can be considered to constitute preferred modes for its practice. However, those of skill in the art should, in light of the present disclosure, appreciate that many changes can be made in the specific embodiments which are disclosed and still obtain a like or similar result without departing from the spirit and scope of the invention.

### A. EXAMPLE 1 - Identifying Optimal Capsid Duplication Length for the Stability of Reporter Flaviviruses

[0072] 1. Materials and methods

[0073] Viruses and cells. Zika virus strain Dakar 41525, yellow fever 17D strain YFS11, dengue virus 1 strain Western Pacific, dengue virus 2 strain New Guinea C, Japanese encephalitis virus 14-14-2 strain 1454, and West Nile virus strain NY99 with NS5 E218A 25,26 were cloned into full-length plasmids using the low copy pCC1 vector as has been previously described²⁷. NEBuilder HiFi DNA Assembly mix (NEB E2621) was used to assemble all plasmids. Full length dengue virus 3 strain VN32 and dengue virus 4 strain MY01 transcripts were assembled from four and three fragments, respectively, by in vitro ligation. Viruses were recovered after electroporation (Biorad GenePulser Xcell) of in vitro transcribed RNAs in Vero (ATCC Cat# CCL-81) or BHK21 (ATCC Cat# CCL-10) cells as previously described²⁰. Vero and BHK21 cells were grown in Dulbecco's Modified Eagle Medium (Gibco 11965) with 10% fetal bovine serum (FBS, Hyclone SH30071) and 1% penicillin/streptomycin (Gibco 15140). Huh7 cells were grown in Dulbecco's Modified Eagle Medium with Glutamax (Gibco 10566) supplemented with 10% FBS, 1% penicillin/streptomycin, and 1% non-essential amino acids (Gibco 11140). Infections were carried out in the same media excepting supplementation with 2% fetal bovine serum instead of 10%. Vero, BHK21, and Huh7 cells were grown at 37° C. in a humidified incubator with 5% CO2.

[0074] Immunofluorescence assay. Vero cells were seeded into chamber slides immediately post-electroporation. At the indicated time points, cells were washed with PBS and fixed with cold methanol at −30° C. for >30 minutes. Slides were washed with PBS and blocked with PBS+1% FBS overnight at 4° C. The flavivirus envelope reactive antibody 4G2 (ATCC Cat# HB-112), diluted in blocking buffer, was used as a primary antibody incubated for 1 hour at room temperature. A secondary goat anti-mouse IgG antibody conjugated with Alexa Fluor 488 (Thermo Fisher Scientific Cat# A-11001) was then used to probe for 4G2 for 1 hour. Slides were then washed 3× with PBS and stained with DAPI (Vector Laboratories, H-1200) and then imaged on a Nikon Eclipse Ti2 microscope. ImageJ (NIH) was used to process the images.

[0075] Focus forming assay. All viruses were titered by focus-forming assay. Viruses were serially diluted ten-fold in DMEM supplemented with 2% FBS and used to infect Vero cells that had been seeded the day previously at 2×10⁵ cells per well in a 24-well plate. After a 1-h infection with rocking every 15 minutes, the virus was removed and methylcellulose/DMEM overlay was added. After four days of infection, the overlay was removed, and cells were fixed with a 1:1 solution of methanol/acetone for >15 minutes. Plates were then washed 3× with PBS, blocked with PBS+3% FBS for 30 minutes, and then incubated with virus-specific mouse immune ascites fluid (MIAF, World Reference Center for Emerging Viruses and Arboviruses, UTMB). After >1-h incubation with MIAF, plates were washed with PBS and incubated with a horseradish peroxidase-conjugated anti-mouse IgG antibody (SeraCare KPL Cat#474-1806). After a 3X PBS wash, foci were developed in the dark using an AEC peroxidase substrate kit (Enzo 43825) according to the manufacturer's protocol and imaged using a BioRad ChemiDoc Imaging System.

[0076] Reporter virus passaging and stability. Virus recovered from electroporation was termed P0. 500 μL of this was added to a T75 flask with a confluent layer of Vero cells. The infection was discontinued once cell death was observed after which media was harvested. 500 of the new passage was then used to infect a new T75 flask for the next passage. This was carried out in parallel series for each virus. Stability was assessed by isolating viral RNA (Qiagen 52904 or TriZOL, Invitrogen 15596026) from each passage and using this as a template for an RT-PCR reaction (Invitrogen 12574) with primers that spanned the 5′ UTR to the end of the capsid. The products were then run on a 0.6% agarose gel and imaged with a BioRad GelDoc EZ Imager.

[0077] Growth kinetics by focus forming assay. Six well plates were seeded at 8×10⁵ cells per well with Vero cells the day before infection. Cells were infected at a MOI of 0.01 in triplicate for 1 h with shaking every 15 minutes, followed by a 3X PBS wash and addition of media supplemented with 2% FBS. Supernatant samples were taken at 24, 48, 72, 96, and 120 h and titered by focus-forming assay.

[0078] Reporter neutralization assays. Reporter neutralization tests were done by two-fold serially diluting sera, starting at 1:50 in DMEM with 2% FBS. Sera samples positive for ZIKV and DENV1-4 were pooled from mice infected with the respective virus. YFV and JEV sera samples were from vaccinated mice. Sera dilutions were mixed 1:1 by volume with the respective reporter virus and incubated at 37° C. for 1 h. The virus/sera mixture was then plated on Vero cells in a white, opaque 96 well plate that was seeded at 1.5×10⁴ cells per well. After a 4-h incubation at 37° C., the wells were washed 2× with PBS and 50 μL of NanoGlo substrate diluted 1:50 in NanoGlo Assay Buffer was added to the cells. Plates were read in a BioTek Cytation 5 plate reader after 3 minutes with a gain of 150. Positive controls consisted of virus infection with no sera. Negative controls comprised virus plated in wells with no cells. This negative control allows for subtraction of background luciferase signals from the virus media. After subtraction of negative controls, values were converted to a percent of the positive control. The data was then analyzed by four parameter nonlinear regression, with the top and bottom constrained to 100 and zero, respectively, and the NT50 reported.

[0079] Antiviral assays. The panflavivirus inhibitor NITD008 was diluted in 90% DMSO to 10 μM and then two-fold serially diluted 8 times. These dilutions were mixed with virus (MOI 0.1-DENV1, DENV2, DENV3; MOI 0.01-ZIKV; MOI 0.001-DENV4, YFV, JEV) and plated on Huh? cells that were seeded at 1.5×10⁴ cells per well the previous day in media with 2% FBS. Cells were washed 48 h post infection three times with PBS followed by addition of NanoGlo substrate diluted 1:100 in NanoGlo Assay Buffer. Plates were read by a BioTek Cytation 5 plate reader after 3 minutes.

[0080] Mosquito infections. For the micro-injection study, Rockefeller strain Aedes aegypti mosquitoes were injected (100 nL) intrathoracically with virus diluted in PBS so that each mosquito received 50 FFU. Mosquitoes were cultured at 28° C. for 8, 12, and 18 days. For blood feeding study, sheep's blood was centrifuged at 1000g, 4° C. for 20 minutes to separate plasma and cells. The plasma was heat-inactivated at 56° C. for 1 hour and the cells were washed twice with PBS after which they were combined again. The blood was spiked with virus to a concentration of 2×10⁶FFU/mL. Engorged mosquitoes were further reared and harvested at 8, 12, and 18 days. At the time points indicated mosquito samples from both experiments were thoroughly homogenized (Qiagen TissueLyser II) in 200₁..t.L PBS and centrifuged to pellet the tissue. 50₁..t.L of supernatant was used for both RT-qPCR and luciferase assay. RNA was harvested using Qiagen RNeasy minikit and used in a Taqman RT-qPCR reaction targeting a region in NS5. Aedes aegypti actin served as a control. For luciferase assay, 50₁..t.L of supernatant from homogenized mosquito was added to a 96 well opaque white plate, followed by addition of NanoGlo substrate, diluted 1:50 in NanoGlo Assay Buffer. Samples were read in a BioTek Cytation 5 plate reader. Background luciferase levels (no mosquitoes) and clean, uninfected mosquitoes were used as negative controls.

[0081] Statistical analysis. Graphpad Prism 8 was used for graphing and statistical analysis. Statistical tests used, as well as significance levels, are noted in the figure legends. All replicated values are shown on each graph.

[0082] 2. Results

[0083] Panel of reporter flaviviruses. Reporter flaviviruses were constructed as first described by¹⁶ using capsid duplication lengths as found in the literature^{10,16,20,23,24} (FIG. 1A-B). All viruses except DENV3 and DENV4, which were assembled by in vitro ligation (FIG. 51), were constructed using traditional, plasmid-based reverse genetics approaches²⁸. DENV3 and DENV4 full genomes are difficult to clone in bacteria, due to putative toxic elements present 29′30.

[0084] The NanoLuc gene followed by the 2A sequence from thosea asigna virus (T2A) were inserted between a duplicated portion of the capsid and the full-length capsid. To help prevent homologous recombination, the codons in the capsid sequence corresponding to the duplicated portion were scrambled to reduce homology. All full-length DNAs were used as a template in an in vitro transcription reaction to generate full-length RNAs, which were subsequently electroporated into Vero cells (for ZIKV, YFV, and WNV) or baby hamster kidney (BHK) cells (for DENV1-4 and JEV). Immunofluorescence assay (IFA) was used to indicate viral spread, post electroporation (FIGS. 1B and 7A). Focus-forming assay shows all reporter viruses form distinct foci (FIG. 1C), but no plaques when stained with crystal violet (data not shown). The IFA and focus-forming results corroborate with the viral replication kinetics among different versions of reporter viruses (see later replication kinetic results in FIG. 3). To assess stability, viruses were passaged ten times on Vero cells according to the scheme in FIG. 8A. RT-PCR products corresponding to each passage show consistent band size for all viruses out to P10, including West Nile virus (WNV) which results were obtained after the initial review of this manuscript (FIG. 7B). The exception to this positive outcome is ZIKV and YFV, which have the shortest capsid duplication, 25 amino acids (FIG. 1D). These two viruses showed a decrease in band size during passaging. These results suggested that the length of the capsid duplication may have an impact on virus stability.

[0085] Extended capsid duplication. The results from passaging these different flaviviruses indicated that a longer capsid duplication could positively impact its stability. This hypothesis was tested by creation of ZIKV and YFV C38 NanoLuc viruses. C38 was chosen based on the robust results from DENV1-4 using this length. During this time, Volkova, et al., published a report on reporter ZIKV and the effect of capsid duplication size on replication. Their conclusion was that C50 is the optimal length for viral growth, with this being the shortest length that was not statistically attenuated compared to WT virus¹⁸. Based on this report, we also constructed a C50 ZIKV. IFA results post-electroporation suggested that ZIKV C38 virus replicated more robustly than the C25 and C50 virus, while YFV C38 showed little difference compared to YFV C25 (FIG. 2A, compare to FIG. 1B). Focus size (FIG. 2B) comparison between ZIKV C25 and ZIKV C50 showed little difference but, ZIKV C38 formed clear, larger plaques similar to non-reporter wild-type ZIKV (FIG. 8B). YFV C38 focus size was only slightly larger than YFV C25. The C38 ZIKV and YFV and C50 ZIKV were continuously passaged and analyzed for reporter gene stability by RT-PCR (FIG. 2C). Unexpectedly, ZIKV C50 showed early instability, so only passaging results from PO-P2 are shown. In contrast, ZIKV and YFV C38 were stable after ten rounds of continuous cell culture. These results suggest that an optimal length of duplicated capsid sequence (e.g., C38) is required for reporter virus stability. Under such condition, the frameshift or other mutations in the duplicated capsid region is not required for the stability of reporter virus.

[0086] Effect of extended capsid duplication on viral growth. The effect of capsid duplication length on viral growth was assessed on Vero cells. Cells were infected with ZIKV C25, C38, and C50 at a MOI of 0.01 and assessed at 24, 48, 72, 96, and 120 h post infection by focus forming assay (FIG. 3A). ZIKV C38 replicated to significantly higher titers than ZIKV C25 and ZIKV C50, reaching 10⁷ FFU/mL, at 24, 48, and 72 h post infection. ZIKV C25 and ZIKV C50 growth are similar across the same time period, though ZIKV C25 titers did continue to increase until 96 h. Conversely, growth comparison of YFV C25 and YFV C38 showed no significant difference at any time point, despite YFV C38's increased stability (FIG. 3B). DENV1-4 and JEV growth kinetics on Vero cells (MOI 0.01) show that DENV1 replicated significantly higher at times 24-96 h post infection (FIG. 3C). Together these data show that among C25, C38, and C50, C38 is the most optimal capsid duplication length for ZIKV replication. In contrast to these results, there seems to be no replication advantage for YFV C38 over YFV C25.

[0087] To directly examine the effect of reporter gene insertion on viral replication, we compared the replication kinetics between the parental wild-type ZIKV and the reporter ZIKV C38 on Vero cells (FIG. 8). The results showed that replication between the two is similar at all time points but 72 h, where WT virus is 10-fold lower, possibly due to death of the host cells.

[0088] Rapid neutralization tests and antiviral discovery. One of the aims of this study was to develop stable reporter flaviviruses for neutralization tests and antiviral compound assays. As we have previously done, the stable reporter viruses were used to test a panel of flavivirus-immune mouse sera in a four-hour neutralization test. Reporter virus neutralization scheme. Vero cells were seeded in an opaque, white 96 well plate at 1.5×10⁴ cells per well the day before. Sera samples were two-fold serially diluted, starting at 1:50 and then mixed with equal volume of virus and incubated for 1 h at 37° C. The sera:virus mixture was then used to inoculate Vero cells in a 96 well plate. After 4 h incubation at 37° C., plates were washed twice with PBS and then NanoGlo substrate was added and luciferase levels read by plate reader. NT50 results are indicative of the previous infection with the homologous virus yielding the highest NT50, though some cross-neutralization by heterologous viruses was observed (FIG. 4A). Using the flavivirus inhibitor NITD008^{31,32}, each virus was used in an antiviral compound assay. Antiviral assay scheme. Huh7 cells (1.5×10⁴ cells per well) were seeded the previous day. NITD008 was two-fold serially diluted starting at 10 μM. The dilutions were mixed with virus and plated on the Huh7 cells in a white, opaque 96 well plate and incubated at 37° C. for 48 h. Following a 3X PBS wash, results were read by plate reader after addition of NanoGlo substrate. Increasing concentrations of NITD008 decreased luciferase expression compared to control (FIG. 4B) resulting in potent EC50 values (FIG. 4C). These results support our previous data showing that NanoLuc-tagged flaviviruses can be valuable tools in rapid sero-diagnostic assays and antiviral compound screens.

[0089] ZIKV C38 in mosquitoes. Reporter virus use in mosquito experiments is highly advantageous, where RNA extraction from individual mosquitoes is time-consuming. Intrathoracic injection of mosquitoes with ZIKV C25 showed no viral replication and no luciferase expression (data not shown), possibly due to reporter gene induced replication attenuation. Because ZIKV C38 had more robust luciferase expression compared to C25 in C6/36 cells (data not shown), we characterized ZIKV C38 replication in whole Aedes aegypti mosquitoes by both micro-injection, which surpasses the midgut barrier, and membrane blood feeding. Mosquitoes were micro-injected in the thorax with 50 FFU ZIKV C38 and at days 8, 12, and 18, whole mosquitoes were homogenized in PBS and assayed by both qPCR (FIG. 5A, left panel) and luciferase assay (right panel). Although viral RNA did not increase from day 8 to day 12, the luciferase assay shows a statistically significant peak at day 12. In a separate experiment, mosquitoes were allowed to feed on blood spiked with 2×10⁶ FFU/mL ZIKV C38. These mosquitoes were also homogenized on days 8, 12, and 18 and evaluated by both qPCR and luciferase assay (FIG. 4B, right and left panel, respectively). By blood feeding, ZIKV C38 titers increased at each time point by qPCR, though the increase was not statistically significant. Corroboratively, the luciferase activities significantly increased from day 8 to 18. Uninfected mosquitoes were also assayed in FIG. 5B (right panel) as a negative control. These data show that ZIKV C38 replicates in Aedes aegypti mosquitoes and luciferase output can be used to assay viral replication.

### REFERENCES

[0090] 1. Chong HY, Leow CY, Maj eed ABA, Leow CH. Flavivirus infection-A review of immunopathogenesis, immunological response, and immunodiagnosis. Virus Res 2019; 274: 197770.
[0091] 2. Bhatt S, Gething PW, Brady OJ et al. The global distribution and burden of dengue. Nature 2013; 496: 504.
[0092] 3. Mathers CD, Ezzati M, Lopez AD. Measuring the Burden of Neglected Tropical Diseases:

[0093] The Global Burden of Disease Framework. Plos Neglect Trop D 2007; 1: e114.
[0094] 4. Schuler-Faccini L, Ribeiro EM, Feitosa IML et al. Possible Association Between Zika Virus

[0095] Infection and Microcephaly - Brazil, 2015. Mmwr Morbidity Mortal Wkly Rep 2016; 65: 59-62.
[0096] 5. Barrett ADT, Higgs S. Yellow Fever: A Disease that Has Yet to be Conquered. Annu Rev

[0097] Entomol 2007; 52: 209-229.
[0098] 6. Ishikawa T, Yamanaka A, Konishi E. A review of successful flavivirus vaccines and the problems with those flaviviruses for which vaccines are not yet available. Vaccine 2014; 32: 1326-1337.
[0099] 7. Guy B, Noriega F, Ochiai RL et al. A recombinant live attenuated tetravalent vaccine for the prevention of dengue. Expert Rev Vaccines 2017; 16: 1-13.
[0100] 8. Yun S-I, Kim S-Y, Rice CM, Lee Y-M. Development and Application of a Reverse Genetics

[0101] System for Japanese Encephalitis Virus. J Virol 2003; 77: 6450-6465.
[0102] 9. Puig-Basagoiti F, Deas TS, Ren P, Tilgner M, Ferguson DM, Shi P-Y. High-Throughput

[0103] Assays Using a Luciferase-Expressing Replicon, Virus-Like Particles, and Full-Length Virus for West Nile Virus Drug Discovery. Antimicrob Agents Ch 2005; 49: 4980-4988.
[0104] 10. Zou G, Xu HY, Qing M, Wang Q-Y, Shi P-Y. Development and characterization of a stable luciferase dengue virus for high-throughput screening. Antivir Res 2011; 91: 11-19.
[0105] 11. Schoggins JW, Wilson SJ, Panis M et al. A diverse range of gene products are effectors of the type I interferon antiviral response. Nature 2011; 472: 481-485.
[0106] 12. Pierson TC, Sanchez MD, Puffer BA et al. A rapid and quantitative assay for measuring antibody-mediated neutralization of West Nile virus infection. Virology 2006; 346: 53-65.
[0107] 13. Shan C, Xie X, Ren P et al. A Rapid Zika Diagnostic Assay to Measure Neutralizing

[0108] Antibodies in Patients. Ebiomedicine 2017; 17: 157-162.
[0109] 14. Pierson TC, Diamond MS, Ahmed AA et al. An infectious West Nile Virus that expresses a

[0110] GFP reporter gene. Virology 2005; 334: 28-40.
[0111] 15. Samsa MM, Mondotte JA, Caramelo JJ, Gamarnik AV. Uncoupling cis-Acting RNA

[0112] Elements from Coding Sequences Revealed a Requirement of the N-Terminal Region of Dengue Virus Capsid Protein in Virus Particle Formation. J Virol 2012; 86: 1046-1058.
[0113] 16. Shustov AV, Mason PW, Frolov I. Production of Pseudoinfectious Yellow Fever Virus with a Two-Component Genome v. J Virol 2007; 81: 11737-11748.
[0114] 17. Mutso M, Saul S, Rausalu K et al. Reverse genetic system, genetically stable reporter viruses and packaged subgenomic replicon based on a Brazilian Zika virus isolate. J Gen Virol 2017; 98: 2712-2724.
[0115] 18. Volkova E, Tsetsarkin KA, Sippert E et al. Novel Approach for Insertion of Heterologous

[0116] Sequences into Full-Length ZIKV Genome Results in Superior Level of Gene Expression and Insert Stability. Viruses 2020; 12: 61.
[0117] 19. Baker C, Xie X, Zou J, Muruato A, Fink K, Shi P-Y. Using recombination-dependent lethal mutations to stabilize reporter flaviviruses for rapid serodiagnosis and drug discovery. Ebiomedicine 2020; 57: 102838.
[0118] 20. Shan C, Xie X, Muruato AE et al. An Infectious cDNA Clone of Zika Virus to Study Viral

[0119] Virulence, Mosquito Transmission, and Antiviral Inhibitors. Cell Host Microbe 2016; 19: 891-900.
[0120] 21. Schoggins JW, Dorner M, Feulner M et al. Dengue reporter viruses reveal viral dynamics in interferon receptor-deficient mice and sensitivity to interferon effectors in vitro. P Natl Acad Sci Usa 2012; 109: 14610-5.
[0121] 22. Samsa MM, Mondotte JA, Iglesias NG et al. Dengue virus capsid protein usurps lipid droplets for viral particle formation. Plos Pathog 2009; 5: e1000632.
[0122] 23. Zhang P-T, Shan C, Li X-D et al. Generation of a recombinant West Nile virus stably expressing the Gaussia luciferase for neutralization assay. Virus Res 2016; 211: 17-24.
[0123] 24. Li X-F, Li X-D, Deng C-L et al. Visualization of a neurotropic flavivirus infection in mouse reveals unique viscerotropism controlled by host type I interferon signaling. Theranostics 2017; 7: 912-925.
[0124] 25. Daffis S, Szretter KJ, Schriewer J et al. 2′-O methylation of the viral mRNA cap evades host restriction by IFIT family members. Nature 2010; 468: 452-6.
[0125] 26. Kaiser JA, Luo H, Widen SG et al. Genotypic and phenotypic characterization of West Nile virus NS5 methyltransferase mutants. Vaccine 2019; 37: 7155-7164.
[0126] 27. Zou J, Xie X, Luo H et al. A single-dose plasmid-launched live-attenuated Zika vaccine induces protective immunity. Ebiomedicine 2018; 36: 92-102.
[0127] 28. Shi P-Y, Tilgner M, Lo MK, Kent KA, Bernard KA. Infectious cDNA Clone of the Epidemic

[0128] West Nile Virus from New York City. J Virol 2002; 76: 5847-5856.
[0129] 29. Gallichotte EN, Widman DG, Yount BL et al. A new quaternary structure epitope on dengue virus serotype 2 is the target of durable type-specific neutralizing antibodies. Mbio 2015; 6: e01461-15.
[0130] 30. Messer WB, Yount B, Hacker KE et al. Development and characterization of a reverse genetic system for studying dengue virus serotype 3 strain variation and neutralization. Plos Neglect Trop D 2012; 6: e1486.
[0131] 31. Yin Z, Chen Y-L, Schul W et al. An adenosine nucleoside inhibitor of dengue virus. P Natl

[0132] Acad Sci Usa 2009; 106: 20435-9.
[0133] 32. Deng Y-Q, Zhang N-N, Li C-F et al. Adenosine Analog NITD008 Is a Potent Inhibitor of

[0134] Zika Virus. Open Forum Infect Dis 2016; 3: ofw175.
[0135] 33. Deas TS, Binduga-Gajewska I, Tilgner M et al. Inhibition of Flavivirus Infections by

[0136] Antisense Oligomers Specifically Suppressing Viral Translation and RNA Replication. J Virol 2005; 79: 4599-4609.
[0137] 34. Xie X, Muruato AE, Zhang X et al. A nanoluciferase SARS-CoV-2 for rapid neutralization testing and screening of anti-infective drugs for COVID-19. Nat Commun 2020; Submitted.
[0138] 35. Muruato AE, Fontes-Garfias CR, Ren P et al. A high-throughput neutralizing antibody assay for COVID-19 diagnosis and vaccine evaluation. Nat Commun 2020; In press.
[0139] 36. Filomatori CV, Lodeiro MF, Alvarez DE, Samsa MM, Pietrasanta L, Gamarnik AV. A 5′

[0140] RNA element promotes dengue virus RNA synthesis on a circular genome. Gene Dev 2006; 20: 2238-2249.
[0141] 37. Clyde K, Harris E. RNA Secondary Structure in the Coding Region of Dengue Virus Type 2

[0142] Directs Translation Start Codon Selection and Is Required for Viral Replication. J Virol 2006; 80: 2170-2182.
[0143] 38. Friebe P, Harris E. Interplay of RNA Elements in the Dengue Virus 5′ and 3′ Ends Required for Viral RNA Replication v. J Virol 2010; 84: 6103-6118.
[0144] 39. Liu Z-Y, Li X-F, Jiang T et al. Novel cis-acting element within the capsid-coding region enhances flavivirus viral-RNA replication by regulating genome cyclization. J Virol 2013; 87: 6804-18.
[0145] 40. Li P, Wei Y, Mei M et al. Integrative Analysis of Zika Virus Genome RNA Structure Reveals Critical Determinants of Viral Infectivity. Cell Host Microbe 2018; 24: 875-886.e5.
[0146] 41. Borba L de, Villordo SM, Iglesias NG, Filomatori CV, Gebhard LG, Gamarnik AV.

[0147] Overlapping Local and Long-Range RNA-RNA Interactions Modulate Dengue Virus Genome Cyclization and Replication. J Virol 2015; 89: 3430-3437.
[0148] 42. Shang Z, Song H, Shi Y, Qi J, Gao GF. Crystal Structure of the Capsid Protein from Zika Virus. J Mot Blot 2018; 430: 948-962.

1. A recombinant flavivirus comprising:
a heterologous reporter cassette, the heterologous reporter cassette having a 5′ end, a nucleotide segment encoding a reporter, and a 3′ end;
the 5′ end of the reporter cassette encoding 25 to 38 amino acids of an amino terminus of flavivirus capsid protein;
the 3′ end of the reporter cassette encoding 25 to 38 amino acids of an amino terminus of the flavivirus capsid protein, wherein the recombinant flavivirus is stable.

2. The recombinant flavivirus of claim 1, further comprising a nucleic acid segment encoding a 2A self-cleaving sequence position immediately 3′ of the reporter and immediately 5′ of the nucleotide segment encoding the second 25 to 38 amino acids of a flavivirus capsid protein.

3. The recombinant flavivirus of claim 2, wherein the 2A self-cleaving segment is a T2A segment.

4. The recombinant flavivirus of claim 1, wherein the flavivirus is a Dengue virus, Zika virus, or Japanese encephalitis virus.

5. The recombinant flavivirus of claim 1, wherein the reporter is a NanoLuc, EGFP, mCherry, mScarlet, mNeonGreen, or Renilla Luciferase reporter.

6. The recombinant flavivirus of claim 1, wherein the flavivirus has a nucleic sequence that is at least 98% identical to SEQ ID NO:13, 15, 17, 19, 21, 23, 25, 27, 29, or 31.

7. The recombinant flavivirus of claim 1, wherein the flavivirus encodes a polyprotein that is at least 95% identical to the amino acid sequence of SEQ ID NO:14, 16, 18, 20, 22, 24, 26, 28, 30, or 32.

8. A recombinant flavivirus polyprotein comprising an amino terminal segment comprising a heterologous reporter, the reporter being flanked by an amino terminal first capsid segment corresponding to capsid segment comprising 25 to 38 amino terminal amino acids of the flavivirus capsid protein and a carboxy terminal second capsid segment corresponding to a capsid segment comprising 25 to 38 amino of the amino terminus of the flavivirus capsid protein.

9. The polyprotein of claim 8, further comprising a 2A self-cleaving segment between the reporter and the second capsid segment.

The application's sequence listing, which the Patent Office published only in electronic form, follows.

SEQUENCE LISTING (32 sequences)

SEQ ID NO: 1 - DNA, 513 bp, Artificial Sequence
  Recombinant protein
  CDS (1)..(513)
atggtcttcacactcgaagatttcgttggggactggcgacagacagccggctacaacctggaccaagtccttgaacagggaggtgtgtccagtttgtttcagaatctcggggtgtccgtaactccgatccaaaggattgtcctgagcggtgaaaatgggctgaagatcgacatccatgtcatcatcccgtatgaaggtctgagcggcgaccaaatgggccagatcgaaaaaatttttaaggtggtgtaccctgtggatgatcatcactttaaggtgatcctgcactatggcacactggtaatcgacggggttacgccgaacatgatcgactatttcggacggccgtatgaaggcatcgccgtgttcgacggcaaaaagatcactgtaacagggaccctgtggaacggcaacaaaattatcgacgagcgcctgatcaaccccgacggctccctgctgttccgagtaaccatcaacggagtgaccggctggcggctgtgcgaacgcattctggcg

SEQ ID NO: 2 - protein, 171 aa, Artificial Sequence
  Synthetic Construct
MVFTLEDFVGDWRQTAGYNLDQVLEQGGVSSLFQNLGVSVTPIQRIVLSGENGLKIDIHVIIPYEGLSGDQMGQIEKIFKVVYPVDDHHFKVILHYGTLVIDGVTPNMIDYFGRPYEGIAVFDGKKITVTGTLWNGNKIIDERLINPDGSLLFRVTINGVTGWRLCERILA

SEQ ID NO: 3 - DNA, 717 bp, Artificial Sequence
  recombinant protein
  CDS (1)..(717)
atggtgagcaagggcgaggagctgttcaccggggtggtgcccatcctggtcgagctggacggcgacgtaaacggccacaagttcagcgtgtccggcgagggcgagggcgatgccacctacggcaagctgaccctgaagttcatctgcaccaccggcaagctgcccgtgccctggcccaccctcgtgaccaccctgacctacggcgtgcagtgcttcagccgctaccccgaccacatgaagcagcacgacttcttcaagtccgccatgcccgaaggctacgtccaggagcgcaccatcttcttcaaggacgacggcaactacaagacccgcgccgaggtgaagttcgagggcgacaccctggtgaaccgcatcgagctgaagggcatcgacttcaaggaggacggcaacatcctggggcacaagctggagtacaactacaacagccacaacgtctatatcatggccgacaagcagaagaacggcatcaaggtgaacttcaagatccgccacaacatcgaggacggcagcgtgcagctcgccgaccactaccagcagaacacccccatcggcgacggccccgtgctgctgcccgacaaccactacctgagcacccagtccgccctgagcaaagaccccaacgagaagcgcgatcacatggtcctgctggagttcgtgaccgccgccgggatcactctcggcatggacgagctgtacaag

SEQ ID NO: 4 - protein, 239 aa, Artificial Sequence
  Synthetic Construct
MVSKGEELFTGVVPILVELDGDVNGHKFSVSGEGEGDATYGKLTLKFICTTGKLPVPWPTLVTTLTYGVQCFSRYPDHMKQHDFFKSAMPEGYVQERTIFFKDDGNYKTRAEVKFEGDTLVNRIELKGIDFKEDGNILGHKLEYNYNSHNVYIMADKQKNGIKVNFKIRHNIEDGSVQLADHYQQNTPIGDGPVLLPDNHYLSTQSALSKDPNEKRDHMVLLEFVTAAGITLGMDELYK

SEQ ID NO: 5 - DNA, 708 bp, Artificial Sequence
  Recombinant protein
  CDS (1)..(708)
atggtgagcaagggcgaggaggataacatggccatcatcaaggagttcatgcgcttcaaggtgcacatggagggctccgtgaacggccacgagttcgagatcgagggcgagggcgagggccgcccctacgagggcacccagaccgccaagctgaaggtgaccaagggtggccccctgcccttcgcctgggacatcctgtcccctcagttcatgtacggctccaaggcctacgtgaagcaccccgccgacatccccgactacttgaagctgtccttccccgagggcttcaagtgggagcgcgtgatgaacttcgaggacggcggcgtggtgaccgtgacccaggactcctccctgcaggacggcgagttcatctacaaggtgaagctgcgcggcaccaacttcccctccgacggccccgtaatgcagaagaagaccatgggctgggaggcctcctccgagcggatgtaccccgaggacggcgccctgaagggcgagatcaagcagaggctgaagctgaaggacggcggccactacgacgctgaggtcaagaccacctacaaggccaagaagcccgtgcagctgcccggcgcctacaacgtcaacatcaagttggacatcacctcccacaacgaggactacaccatcgtggaacagtacgaacgcgccgagggccgccactccaccggcggcatggacgagctgtacaag

SEQ ID NO: 6 - protein, 236 aa, Artificial Sequence
  Synthetic Construct
MVSKGEEDNMAIIKEFMRFKVHMEGSVNGHEFEIEGEGEGRPYEGTQTAKLKVTKGGPLPFAWDILSPQFMYGSKAYVKHPADIPDYLKLSFPEGFKWERVMNFEDGGVVTVTQDSSLQDGEFIYKVKLRGTNFPSDGPVMQKKTMGWEASSERMYPEDGALKGEIKQRLKLKDGGHYDAEVKTTYKAKKPVQLPGAYNVNIKLDITSHNEDYTIVEQYERAEGRHSTGGMDELYK

SEQ ID NO: 7 - DNA, 696 bp, Artificial Sequence
  recombinant protein
  CDS (1)..(696)
atggtgagcaaaggagaggcagtgataaaggaattcatgcggtttaaggtccacatggagggatccatgaacggccacgaatttgagatcgaaggagaaggcgagggacgcccctatgaggggacccagaccgccaagctcaaggtcacaaagggaggccccctgcccttctcctgggatatcctgtcccctcagtttatgtacggctccagagcctttacaaagcaccccgccgatataccagactactacaagcagtccttcccagaaggatttaagtgggagcgcgtgatgaactttgaagatggcggagccgtcacagtgacccaagacacatccctggaggatggcaccctgatctataaagtgaagctccgcggcaccaacttccctcctgatggacccgtaatgcagaagaagacaatgggctgggaagcgtcaaccgagcggttgtaccccgaggacggggtgctgaagggtgacattaaaatggccctgcgcctgaaagacggaggaaggtacctggctgacttcaaaaccacatataaggccaagaagcccgtgcagatgcccggcgcctacaacgtcgaccgcaagttggacatcacctcccataacgaggattacaccgtggtggaacagtacgaacgctccgaaggtcgccactccaccggcggcatggacgagctgtacaag

SEQ ID NO: 8 - protein, 232 aa, Artificial Sequence
  Synthetic Construct
MVSKGEAVIKEFMRFKVHMEGSMNGHEFEIEGEGEGRPYEGTQTAKLKVTKGGPLPFSWDILSPQFMYGSRAFTKHPADIPDYYKQSFPEGFKWERVMNFEDGGAVTVTQDTSLEDGTLIYKVKLRGTNFPPDGPVMQKKTMGWEASTERLYPEDGVLKGDIKMALRLKDGGRYLADFKTTYKAKKPVQMPGAYNVDRKLDITSHNEDYTVVEQYERSEGRHSTGGMDELYK

SEQ ID NO: 9 - DNA, 708 bp, Artificial Sequence
  Recombinant protein
  CDS (1)..(708)
atggtgagcaaaggagaagaggacaacatggcatcactcccagctacacatgagctgcatatcttcggatccatcaacggagtggacttcgatatggtgggacagggtacagggaacccaaacgacggatacgaggagttgaacctgaagagtaccaagggagacctgcagttctcaccatggatactcgtcccacatataggatacggctttcatcagtacctgccctatccagacggaatgtcacctttccaggcagccatggttgacgggagcggttaccaggtccacaggacaatgcagtttgaggacggagcctcattgaccgtgaactacagatatacctacgaaggaagccatatcaagggagaggctcaagtgaagggaactggattcccagcggacggacccgtgatgaccaacagtctgacggctgcagactggtgcagatccaaaaagacctacccaaatgacaagacaatcataagcaccttcaagtggtcatacactacaggaaacgggaagagatacaggagcactgccagaaccacatacactttcgccaagcctatggctgcaaactacctcaagaaccaacccatgtatgtgttcagaaagacagaactgaagcattctaagaccgaactgaacttcaaggagtggcagaaggcctttactgacgtgatgggaatggacgaactctacaag

SEQ ID NO: 10 - protein, 236 aa, Artificial Sequence
  Synthetic Construct
MVSKGEEDNMASLPATHELHIFGSINGVDFDMVGQGTGNPNDGYEELNLKSTKGDLQFSPWILVPHIGYGFHQYLPYPDGMSPFQAAMVDGSGYQVHRTMQFEDGASLTVNYRYTYEGSHIKGEAQVKGTGFPADGPVMTNSLTAADWCRSKKTYPNDKTIISTFKWSYTTGNGKRYRSTARTTYTFAKPMAANYLKNQPMYVFRKTELKHSKTELNFKEWQKAFTDVMGMDELYK

SEQ ID NO: 11 - DNA, 939 bp, Artificial Sequence
  recombinant protein
  CDS (1)..(939)
atggcttccaaggtgtacgaccccgagcaacgcaaacgcatgatcactgggcctcagtggtgggctcgctgcaagcaaatgaacgtgctggactccttcatcaactactatgattccgagaagcacgccgagaacgccgtgatttttctgcatggtaacgctgcctccagctacctgtggaggcacgtcgtgcctcacatcgagcccgtggctagatgcatcatccctgatctgatcggaatgggtaagtccggcaagagcgggaatggctcatatcgcctcctggatcactacaagtacctcaccgcttggttcgagctgctgaaccttccaaagaaaatcatctttgtgggccacgactggggggcttgtctggcctttcactactcctacgagcaccaagacaagatcaaggccatcgtccatgctgagagtgtcgtggacgtgatcgagtcctgggacgagtggcctgacatcgaggaggatatcgccctgatcaagagcgaagagggcgagaaaatggtgcttgagaataacttcttcgtcgagaccatgctcccaagcaagatcatgcggaaactggagcctgaggagttcgctgcctacctggagccattcaaggagaagggcgaggttagacggcctaccctctcctggcctcgcgagatccctctcgttaagggaggcaagcccgacgtcgtccagattgtccgcaactacaacgcctaccttcgggccagcgacgatctgcctaagatgttcatcgagtccgaccctgggttcttttccaacgctattgtcgagggagctaagaagttccctaacaccgagttcgtgaaggtgaagggcctccacttcagccaggaggacgctccagatgaaatgggtaagtacatcaagagcttcgtggagcgcgtgctgaagaacgagcagcgtacg

SEQ ID NO: 12 - protein, 313 aa, Artificial Sequence
  Synthetic Construct
MASKVYDPEQRKRMITGPQWWARCKQMNVLDSFINYYDSEKHAENAVIFLHGNAASSYLWRHVVPHIEPVARCIIPDLIGMGKSGKSGNGSYRLLDHYKYLTAWFELLNLPKKIIFVGHDWGACLAFHYSYEHQDKIKAIVHAESVVDVIESWDEWPDIEEDIALIKSEEGEKMVLENNFFVETMLPSKIMRKLEPEEFAAYLEPFKEKGEVRRPTLSWPREIPLVKGGKPDVVQIVRNYNAYLRASDDLPKMFIESDPGFFSNAIVEGAKKFPNTEFVKVKGLHFSQEDAPDEMGKYIKSFVERVLKNEQRT

SEQ ID NO: 13 - DNA, 11457 bp, Artificial Sequence
  recombinant flavivirus
  CDS (107)..(11029)
agttgttgatctgtgtgaatcagactgcgacagttcgagtttgaagcgagagctaacaacagtatcaacaggtttaatttggatttggaaacgagagtttctggtcatgaaaaacccaaagaagaaatccggaggattccggattgtcaatatgctaaaacgcggagtagcccgtgtaaacatggtcttcacactcgaagatttcgttggggactggcgacagacagccggctacaacctggaccaagtccttgaacagggaggtgtgtccagtttgtttcagaatctcggggtgtccgtaactccgatccaaaggattgtcctgagcggtgaaaatgggctgaagatcgacatccatgtcatcatcccgtatgaaggtctgagcggcgaccaaatgggccagatcgaaaaaatttttaaggtggtgtaccctgtggatgatcatcactttaaggtgatcctgcactatggcacactggtaatcgacggggttacgccgaacatgatcgactatttcggacggccgtatgaaggcatcgccgtgttcgacggcaaaaagatcactgtaacagggaccctgtggaacggcaacaaaattatcgacgagcgcctgatcaaccccgacggctccctgctgttccgagtaaccatcaacggagtgaccggctggcggctgtgcgaacgcattctggcgggaagcggagagggcagaggaagtctgctaacatgcggtgacgtcgaggagaatcctggacctatgaagaatcccaaaaaaaagagcggcggctttagaatcgtgaacatgttgaaaagaggagttgctagagtcaatccattgggaggtttgaagaggctgccagccggacttctgctgggccatggacccatcagaatggttttggcgatactagccttcttgagattcacagcaatcaaaccatcactgggcctcatcaatagatggggttccgtggggaagaaggaggctatggaaataataaaaaagttcaagaaagaccttgctgccatgttgagaattatcaatgctaggaaggagaggaagagacgtggcgctgacaccagcatcggaatcgtcggcctcctgctgaccacagccatggcagccgagatcactagacgtgggagtgcatactacatgtacttggacaggagcgatgctggtaaggccatttcttttgccaccacattgggggtgaacaaatgccatgtacagatcatggacctcgggcacatgtgtgacgccaccatgagttatgagtgccccatgctagacgagggagtggagccagatgacgtcgattgctggtgcaacacgacatcgacttgggttgtgtacggaacctgtcatcataaaaaaggtgaagcacgacgatccagaagagccgtgacgcttccttctcactccacgaggaagctgcaaacgcgatcgcagacttggctagagtcaagagaatacacaaagcacctgatcaaggttgaaaattggatatttaggaaccccgggtttgcgctagtggctgtagctatagcctggctcctgggaagctcgacgagccaaaaagttatatacttggtcatgatattgttgattgccccggcatacagcattaggtgcataggagttagcaatagagacttcgtggagggcatgtcaggtgggacctgggttgatgttgtcttggaacatgggggttgcgtcaccgtgatggcacaggacaagccaacagttgatatcgagttggtcacgacaacggttagcaacatggccgaggtaagatcctactgctatgaggcatcaatatcggacatggcttcggacagccgttgtccaacacaaggtgaagcctaccttgacaagcagtcagacactcaatatgtctgcaagagaacattggtggatagaggttggggaaatgggtgtggactttttggcaaagggagcttggtgacatgtgccaagtttacgtgctccaagaaaatgacaggcaagagcatccagccggagaacttggagtaccggataatgctatcagtgcatggatcccagcacagtgggatgattgtgaatgacacaggacatgaaactgacgaaaacagagcaaaagtcgaggtcacacccaattcaccaagagcagaagcaaccttgggaggttttggaagcttgggacttgactgtgaaccaaggacaggccttgacttctcagacctgtattacctgaccatgaacaataagcattggttggtgcacaaggagtggtttcatgacatcccattaccttggcatgctggtgcagacactggaactccacactggaacaacaaagaggcattggtggagttcaaggacgcccacgccaagaggcaaactgttgtggttctggggagccaagagggagctgttcatacggccctcgctggagctttggaggctgagatggatggtgcaaagggaaggctattctctggccatttgaaatgccgcctaaaaatggacaagcttaggttgaagggtgtgtcatattccctgtgtaccgcagcgttcacatttaccaaggtcccagctgaaacattgcatggaacagtcacagtggaggtgcagtatgcagggacagacggaccctgcaaagtcccagcccagatggcggtggacatgcagaccctgaccccagttggaaggctgataaccgccaatcctgtgatcactgaaagtactgagaattcaaagatgatgttggagctcgacccaccatttggggattcttacattgtcataggagtcggggacaagaaaatcacccatcactggcatcggagtggtagcaccatcggaaaggcatttgaagccactgtgagaggtgccaagagaatggcagtcttgggggacacagcctgggactttggatcagttgggggtgtgtttaattcattgggtaagggtattcaccaaatctttggagcagctttcaaatcactgtttggaggaatgtcctggttctcacagatcctcataggcacactgttggtgtggttaggtttgaacacaaagaatggatctatctccctcacatgcttagccctggggggagtgatgatcttcctttccacggctgtttctgctgatgttgggtgctcggtggacttctcaaaaaaggaaacgagatgtggcacgggggtgttcgtctacaatgacgttgaagcctggagggaccggtacaagtaccatcctgactccccccgcagattggcagcagctgttaagcaggcttgggaagaggggatttgtgggatctcctccgtttcgagaatggaaaacatcatgtggaaatcagtggaaggggagcttaatgcaatcctagaggagaatggagttcaactgacagttgtagtggggtctgtaaaaaaccctatgtggagaggtccacagagattgccagtgcctgtgaatgagctgccccatggctggaaagcctgggggaaatcgtactttgtcagagcagcaaagaccaacaacagttttgttgtcgacggtgacacactgaaggagtgtccgctcaaacatagagcatggaatagcttccttgtggaggatcacgggtttgggatcttccacaccagtgtttggctgaaggtcagagaggactactcactagagtgtgacccagccgtcataggaacagctgtcaagggaaaggaagctgcacacagtgatctaggctattggattgagagtgaaaagaatgacacatggaggctgaggagggctcatctgattgagatgaaaacatgtgagtggccaaagtctcacacactgtggacagatggagtggaagaaagtgatctgatcatacccaagtccttagctggtccactcagccaccacaacaccagagagggttacagaactcaagtgaaagggccatggcatagtgaagagctcgaaatccggtttgaggagtgcccaggaaccaaggttcacgtggaggagacatgcggaactagaggaccatctctgagatcaactactgctagtggaagggtcatagaggaatggtgctgtagggaatgcacaatgcctccactatcgttccgggcgaaagacggctgctggtatggaatggagataaggcccagaaaggaaccagagagcaacttagtgaggtccatggtgacagcaggatcaaccgatcatatggatcacttctctcttggagtgcttgtgattctactcatggtgcaggaaggtttgaagaagagaatgaccacaaagatcataatgagcacatcaatggcagtgctggtagccatggtcttgggaggattctcaatgagtgacctggctaagcttgtgatcctgatgggtgctactttcgcagaaatgaacactggaggagatgtagctcacttggcattggttgcggcatttaaagtcagaccagccttgttggtttccttcatcttcagagccaactggacaccccgtgagagcatgctgctagccctggcttcgtgcctcctgcagactgcgatctctgctcttgaaggcgagctgatggtcctcgttaatggatttgctttggcctggttggcaatacgagcaatggccgtgccacgcactgacaatatcgctctggcaattctggctgctctaacaccattagccagaggcacactgctcgtggcatggagagcgggcctcgccacttgtggagggttcatgctcctttccctgaaagggaaaggtagtgtgaagaagaacctgccttttgtcatggccttggggttgaccgctgtgaggatagtggaccccatcaatgtggtaggactactgttactcacaaggagtggaaaacggagctggcctcctagtgaagtgcttacagctgttggcctgatatgtgcactggccggagggtttgccaaggcagacatagagatggctgggcccatggctgcagtgggcctgctaattgtcagttatgtggtctcgggaaagagtgtggacatgtacatcgaaagagcaggtgacatcacatgggaaaaagacgcggaagtcactggaaacagtcctcggcttgacgtggcactagatgagagtggtgatttctccttggtagaggaggatggcccacccatgagagagatcatactcaaggtggttctgatggccatctgtggcatgaacccaatagccatacccttcgctgcaggagcgtggtatgtgtatgtaaagactggaaaaaggagtggtgccctctgggacgtgcctgctcccaaagaagtgaaaaaaggagagactacagatggagtgtacagagtgatgactcgcagactgctgggttcaacacaggttggagtgggagtcatgcaagagggagtcttccacaccatgtggcacgtcacaaaaggagccgcattgaggagcggtgaaggaagacttgatccatattggggggacgtcaagcaggacttggtgtcatattgtgggccttggaagttggatgcagcctgggatggactaagtgaagtgcagcttttggccgtaccccccggagagagggctagaaacattcagactctgcctggaatattcaagacaaaggatggggacatcggagcagtcgctctagactaccccgcaggaacctcaggatctccaatcctagacaaatgcggaagagtgataggactttatggcaatggggttgtgatcaagaatggaagctatgttagtgccataacccagggaaaaagggaggaggaggctccagttgagtgctttgaaccctcgatgctgaggaagaagcagctaacagtcttggatctgcatccaggagccgggaaaaccaggagggttcttcctgaaatagtccgtgaagccataaagaagagacttcgcacagtgatcctagcaccaaccagggtcgttgccgctgagatggaggaagccctaagaggactgccggtgcgttacatgacaacagcagtcaacgtcacccactctgggacagaaatcgtcgatttgatgtgccatgccaccttcacttcacgcctactacaacccatcagagtccccaactacaacctttacatcatggatgaagctcatttcacagatccctcaagcatagctgcacgaggatatatatcaacaagggttgaaatgggcgaggcggctgctatcttcatgactgctacaccaccaggaacccgcgatgcgtttccggattccaactcaccaatcatggacacagaagtggaagttccagagagagcctggagctcaggctttgactgggtgacggatcattctgggaaaacaatttggtttgttccaagtgtgagaaacggaaatgaaatcgcagcctgtctgacaaaggctggaaagcgggtcatacagctcagcaggaagacttttgagacagagtttcagaagacaaaaaatcaagagtgggactttgtcataacaactgacatttcagagatgggtgccaatttcaaggctgaccgggtcatagattccaggagatgcctaaagccagtcatactcgatggcgagagagtcatcctggctgggcccatgcctgtcacgcatgccagtgctgctcagaggagaggacgtgtaggcaggaaccccaacaaacctggagatgagtacatgtatggaggtgggtgtgcagagactgatgaagaccatgcacactggcttgaagcaagaatgcttcttgacaacatttacctccaggatggcctcatagcctcgctctatcggcctgaggccgacaaggtagccgccattgagggagagttcaagctgaggacagagcaaaggaagacctttgtggaactcatgaagagaggagaccttcccgtttggctggcctatcaagtagcatctgccggaataacttacacagatagaagatggtgctttgatggcactaccaacaacaccataatggaagacagtgtaccagcagaggtgtggaccaagtatggagagaagagagtgcttaaaccgaggtggatggatgctagggtctgttcagatcatgcggctctgaagtcgttcaaagaatttgccgctgggaagagaggagcggctttgggagtaatggatgccctgggaacattgccaggacacatgacagagaggtttcaggaagccattgacaatctcgctgtgctcatgcgagcagagactggaagtaggccctacaaagcagcggcagctcaactgccggagaccttagagactatcatgcttctgggcttattgggaacagtttcgctaggaatcttctttgtcttgatgcggaacaagggcatcgggaagatgggcttcggaatggtaacccttggggccagcgcatggctcatgtggctttcggaaattgaaccagccagaatcgcatgtgtcctcattgtcgtgtttttgttgctggtggtgctcatacccgagccagagaagcaaagatctccccaggataatcaaatggcaatcatcatcatggtggcagttggccttctgggtttgataactgcaaatgaactcggatggctggaaaggacaaaaagtgatatagctcatctaatgggaaggaaagaagaggggacaaccatgggattctcaatggatattgatctgcggccagcctccgcctgggctatttatgccgcattgacaactctcatcaccccagccgtccaacatgcggtaaccacctcatacaacaactactccctgatggcgatggccacacaagctggagtgctgtttggcatgggcaaagggatgccattttatgcatgggactttggagtcccgctgctaatgatgggttgctactcacaattaacacccctgaccctgatagtggccatcattctgcttgtggcacactacatgtacttgatcccaggtttgcaggcagcagcagcacgtgctgcccagaagaggacagcagctggcatcatgaagaatcccgttgtggatggaatagtggtgactgacattgacacaatgacaattgacccccaagtggagaagaagatgggacaagtgttactcatagcagtagctgtctccagtgctgtgctactgcggaccgcttggggatggggggaggctggggctctgatcacagcagcaacctccaccttatgggaaggctctccaaacaaatactggaactcctccacagccacctcactgtgcaacatctttagaggaagttatttggcaggggcttcccttatttacacagtgacaagaaatgccggtctggttaagagacgtggaggtggaacgggagagaccctgggagagaagtggaaagcccgcctgaaccagatgtcggccttggagttctactcttacaaaaagtcaggcatcaccgaagtgtgtagggaggaggcgcgccgcgccctcaaggatggagtggccacaggaggacatgctgtatcccggggaagcgcaaagcttagatggttggtagagagaggatacctgcagccccatggaaaggttgttgaccttggatgtggcagaggaggctggagttattacgctgccaccatccgtaaagtgcaggaggtcagaggatacacaaagggaggtcctggccatgaagagcccatgctggtgcaaagctatgggtggaacatagttcgcctcaagagtggagtggacgtcttccacatggcggctgaaccgtgtgacactctgctgtgtgacataggcgagtcatcatccagtcctgaagtggaagagacgcgaacactcagagtgctctccatggtgggagactggcttgaaaaaagaccaggggccttctgcataaaggtgctgtgcccatacaccagcacaatgatggagaccatggagcgactgcaacgtaggcatgggggaggattagtcagagtgccattgtcccgcaactctacacatgagatgtattgggtctctggagccaaaagtaacatcataaagagtgtgtccaccacaagtcagctcctcttgggacgcatggaagggcctaggaggccagtgaaatatgaggaggatgtgaacctcggctcaggcacacgagctgtggcaagctgcgctgaggctcccaacatgaagatcattggtaggcgcattgagagaatccgcaatgaacatgcagagacatggttctttgatgaaaaccacccatacaggacatgggcctaccatgggagctacgaagcccccacgcaggggtcagcgtcatccctcgtgaacggggttgttagactcttgtcaaagccctgggatgtggtgactggagttacaggaatagctatgactgacaccacgccatacggccaacaaagagtcttcaaggaaaaagtggacaccagggtgccagatccccaagaaggcactcgccaagtgatgaacatggtatcgtcttggctatggaaggagctgggaaaacgcaagcgaccacgtgtctgcaccaaagaagagttcattaataaggtgcgcagcaatgcagcactgggagcaatatttgaagaggaaaaagaatggaagacagctgtagaagctgtgaatgatccaagattttgggctctagtggacaaggaaagagaacaccacctgagaggagagtgtcatagctgtgtgtacaacatgatgggcaaaagagaaaagaagcaaggagaattcgggaaagcaaaaggcagccgcgcaatctggtacatgtggttgggagccagatttttggagtttgaagctcttgggttcttgaacgaggaccactggatggggagagaaaactcaggaggtggcgttgaagggctaggactgcaaaggcttggatatatcctagaagaaatgaaccgggcaccaggaggaaagatgtatgcagatgacactgctggctgggacacccgcattagcaagtttgatctggagaatgaagccctgatcactaaccagatggaagaagggcacagagctctggcgttggccgtgattaaatacacataccaaaacaaagtggtgaaggttctcagaccagctgaaggagggaaaacagtcatggacatcatctcaagacaagaccagagagggagcggacaagttgttacttatgctctcaacacattcaccaacctggtggtgcagcttatccggaacatggaggctgaggaagtgctagagatgcatgatctgtggttgttgaggaagccagagaaagtgaccagatggttgcagagcaatggatgggacagactcaaacggatggcagttagtggagatgactgcgttgtaaagccaattgatgataggtttgcacatgccctcaggttcttgaatgacatgggaaaggttaggaaagacacacaggaatggaaaccctcgactggatggagcaattgggaagaggtcccgttctgttctcaccacttcaacaagctgcacctcaaggacgggagatccattgtggtcccctgccgccaccaagatgaactgattggccgagcccgtgtctcaccaggggcaggatggagcatccgggagactgcttgtcttgcaaaatcatatgcacagatgtggcagcttctttatttccacagaagagacctccgactgatggccaatgccatttgttcggctgtgccaattgactgggtaccaactgggagaaccacctggtcaatccatggaaagggagaatggatgactactgaggacatgctcatggtgtggaatagagtgtggattgaggagaacgaccacatggaggacaagacccctgtaacaaaatggacagacattccctatttgggaaaaagggaggacttatggtgtggatcccttatagggcatagacctcgcaccacttgggctgagaacatcaaagacacagtcaacatggtgcgtaggatcataggtgatgaagaaaagttcatggactacctatccacccaagtacgctacttgggtgaggaagggtccacacctggagtgctgtaagcatcaatttcaatgttgtcaggcctgctagtcagccacagtttggggaaagctgtgcagcctgtaacccccccaggagaagctgggaaaccaagctcatagtcaggccgataacgccatggcacggaaaaagccatgctgcctgtgagcccctcagaggacactgagtcaaaaaaccccacgcgcttggaagcgcaggatgggaaaagaaggtggcgaccttccccaccctttaatctggggcctgaactggagattagctgtgaatctccggcagaaggactagtggttagaggagaccccccggaaaacgcaaaacagcatattgacgctgggaaagaccagagactccatgagtttccaccacgctggccgccaggcacagatcgccgaacagcggcggccggtgtggggaaatccatgggtct

SEQ ID NO: 14 - protein, 3640 aa, Artificial Sequence
  Synthetic Construct
MKNPKKKSGGFRIVNMLKRGVARVNMVFTLEDFVGDWRQTAGYNLDQVLEQGGVSSLFQNLGVSVTPIQRIVLSGENGLKIDIHVIIPYEGLSGDQMGQIEKIFKVVYPVDDHHFKVILHYGTLVIDGVTPNMIDYFGRPYEGIAVFDGKKITVTGTLWNGNKIIDERLINPDGSLLFRVTINGVTGWRLCERILAGSGEGRGSLLTCGDVEENPGPMKNPKKKSGGFRIVNMLKRGVARVNPLGGLKRLPAGLLLGHGPIRMVLAILAFLRFTAIKPSLGLINRWGSVGKKEAMEIIKKFKKDLAAMLRIINARKERKRRGADTSIGIVGLLLTTAMAAEITRRGSAYYMYLDRSDAGKAISFATTLGVNKCHVQIMDLGHMCDATMSYECPMLDEGVEPDDVDCWCNTTSTWVVYGTCHHKKGEARRSRRAVTLPSHSTRKLQTRSQTWLESREYTKHLIKVENWIFRNPGFALVAVAIAWLLGSSTSQKVIYLVMILLIAPAYSIRCIGVSNRDFVEGMSGGTWVDVVLEHGGCVTVMAQDKPTVDIELVTTTVSNMAEVRSYCYEASISDMASDSRCPTQGEAYLDKQSDTQYVCKRTLVDRGWGNGCGLFGKGSLVTCAKFTCSKKMTGKSIQPENLEYRIMLSVHGSQHSGMIVNDTGHETDENRAKVEVTPNSPRAEATLGGFGSLGLDCEPRTGLDFSDLYYLTMNNKHWLVHKEWFHDIPLPWHAGADTGTPHWNNKEALVEFKDAHAKRQTVVVLGSQEGAVHTALAGALEAEMDGAKGRLFSGHLKCRLKMDKLRLKGVSYSLCTAAFTFTKVPAETLHGTVTVEVQYAGTDGPCKVPAQMAVDMQTLTPVGRLITANPVITESTENSKMMLELDPPFGDSYIVIGVGDKKITHHWHRSGSTIGKAFEATVRGAKRMAVLGDTAWDFGSVGGVFNSLGKGIHQIFGAAFKSLFGGMSWFSQILIGTLLVWLGLNTKNGSISLTCLALGGVMIFLSTAVSADVGCSVDFSKKETRCGTGVFVYNDVEAWRDRYKYHPDSPRRLAAAVKQAWEEGICGISSVSRMENIMWKSVEGELNAILEENGVQLTVVVGSVKNPMWRGPQRLPVPVNELPHGWKAWGKSYFVRAAKTNNSFVVDGDTLKECPLKHRAWNSFLVEDHGFGIFHTSVWLKVREDYSLECDPAVIGTAVKGKEAAHSDLGYWIESEKNDTWRLRRAHLIEMKTCEWPKSHTLWTDGVEESDLIIPKSLAGPLSHHNTREGYRTQVKGPWHSEELEIRFEECPGTKVHVEETCGTRGPSLRSTTASGRVIEEWCCRECTMPPLSFRAKDGCWYGMEIRPRKEPESNLVRSMVTAGSTDHMDHFSLGVLVILLMVQEGLKKRMTTKIIMSTSMAVLVAMVLGGFSMSDLAKLVILMGATFAEMNTGGDVAHLALVAAFKVRPALLVSFIFRANWTPRESMLLALASCLLQTAISALEGELMVLVNGFALAWLAIRAMAVPRTDNIALAILAALTPLARGTLLVAWRAGLATCGGFMLLSLKGKGSVKKNLPFVMALGLTAVRIVDPINVVGLLLLTRSGKRSWPPSEVLTAVGLICALAGGFAKADIEMAGPMAAVGLLIVSYVVSGKSVDMYIERAGDITWEKDAEVTGNSPRLDVALDESGDFSLVEEDGPPMREIILKVVLMAICGMNPIAIPFAAGAWYVYVKTGKRSGALWDVPAPKEVKKGETTDGVYRVMTRRLLGSTQVGVGVMQEGVFHTMWHVTKGAALRSGEGRLDPYWGDVKQDLVSYCGPWKLDAAWDGLSEVQLLAVPPGERARNIQTLPGIFKTKDGDIGAVALDYPAGTSGSPILDKCGRVIGLYGNGVVIKNGSYVSAITQGKREEEAPVECFEPSMLRKKQLTVLDLHPGAGKTRRVLPEIVREAIKKRLRTVILAPTRVVAAEMEEALRGLPVRYMTTAVNVTHSGTEIVDLMCHATFTSRLLQPIRVPNYNLYIMDEAHFTDPSSIAARGYISTRVEMGEAAAIFMTATPPGTRDAFPDSNSPIMDTEVEVPERAWSSGFDWVTDHSGKTIWFVPSVRNGNEIAACLTKAGKRVIQLSRKTFETEFQKTKNQEWDFVITTDISEMGANFKADRVIDSRRCLKPVILDGERVILAGPMPVTHASAAQRRGRVGRNPNKPGDEYMYGGGCAETDEDHAHWLEARMLLDNIYLQDGLIASLYRPEADKVAAIEGEFKLRTEQRKTFVELMKRGDLPVWLAYQVASAGITYTDRRWCFDGTTNNTIMEDSVPAEVWTKYGEKRVLKPRWMDARVCSDHAALKSFKEFAAGKRGAALGVMDALGTLPGHMTERFQEAIDNLAVLMRAETGSRPYKAAAAQLPETLETIMLLGLLGTVSLGIFFVLMRNKGIGKMGFGMVTLGASAWLMWLSEIEPARIACVLIVVFLLLVVLIPEPEKQRSPQDNQMAIIIMVAVGLLGLITANELGWLERTKSDIAHLMGRKEEGTTMGFSMDIDLRPASAWAIYAALTTLITPAVQHAVTTSYNNYSLMAMATQAGVLFGMGKGMPFYAWDFGVPLLMMGCYSQLTPLTLIVAIILLVAHYMYLIPGLQAAAARAAQKRTAAGIMKNPVVDGIVVTDIDTMTIDPQVEKKMGQVLLIAVAVSSAVLLRTAWGWGEAGALITAATSTLWEGSPNKYWNSSTATSLCNIFRGSYLAGASLIYTVTRNAGLVKRRGGGTGETLGEKWKARLNQMSALEFYSYKKSGITEVCREEARRALKDGVATGGHAVSRGSAKLRWLVERGYLQPHGKVVDLGCGRGGWSYYAATIRKVQEVRGYTKGGPGHEEPMLVQSYGWNIVRLKSGVDVFHMAAEPCDTLLCDIGESSSSPEVEETRTLRVLSMVGDWLEKRPGAFCIKVLCPYTSTMMETMERLQRRHGGGLVRVPLSRNSTHEMYWVSGAKSNIIKSVSTTSQLLLGRMEGPRRPVKYEEDVNLGSGTRAVASCAEAPNMKIIGRRIERIRNEHAETWFFDENHPYRTWAYHGSYEAPTQGSASSLVNGVVRLLSKPWDVVTGVTGIAMTDTTPYGQQRVFKEKVDTRVPDPQEGTRQVMNMVSSWLWKELGKRKRPRVCTKEEFINKVRSNAALGAIFEEEKEWKTAVEAVNDPRFWALVDKEREHHLRGECHSCVYNMMGKREKKQGEFGKAKGSRAIWYMWLGARFLEFEALGFLNEDHWMGRENSGGGVEGLGLQRLGYILEEMNRAPGGKMYADDTAGWDTRISKFDLENEALITNQMEEGHRALALAVIKYTYQNKVVKVLRPAEGGKTVMDIISRQDQRGSGQVVTYALNTFTNLVVQLIRNMEAEEVLEMHDLWLLRKPEKVTRWLQSNGWDRLKRMAVSGDDCVVKPIDDRFAHALRFLNDMGKVRKDTQEWKPSTGWSNWEEVPFCSHHFNKLHLKDGRSIVVPCRHQDELIGRARVSPGAGWSIRETACLAKSYAQMWQLLYFHRRDLRLMANAICSAVPIDWVPTGRTTWSIHGKGEWMTTEDMLMVWNRVWIEENDHMEDKTPVTKWTDIPYLGKREDLWCGSLIGHRPRTTWAENIKDTVNMVRRIIGDEEKFMDYLSTQVRYLGEEGSTPGVL

SEQ ID NO: 15 - DNA, 11496 bp, Artificial Sequence
  recombinant flavivirus
  CDS (107)..(11068)
agttgttgatctgtgtgaatcagactgcgacagttcgagtttgaagcgagagctaacaacagtatcaacaggtttaatttggatttggaaacgagagtttctggtcatgaaaaacccaaagaagaaatccggaggattccggattgtcaatatgctaaaacgcggagtagcccgtgtaaacccattgggaggtttgaagaggctgccagccggacttctgatggtcttcacactcgaagatttcgttggggactggcgacagacagccggctacaacctggaccaagtccttgaacagggaggtgtgtccagtttgtttcagaatctcggggtgtccgtaactccgatccaaaggattgtcctgagcggtgaaaatgggctgaagatcgacatccatgtcatcatcccgtatgaaggtctgagcggcgaccaaatgggccagatcgaaaaaatttttaaggtggtgtaccctgtggatgatcatcactttaaggtgatcctgcactatggcacactggtaatcgacggggttacgccgaacatgatcgactatttcggacggccgtatgaaggcatcgccgtgttcgacggcaaaaagatcactgtaacagggaccctgtggaacggcaacaaaattatcgacgagcgcctgatcaaccccgacggctccctgctgttccgagtaaccatcaacggagtgaccggctggcggctgtgcgaacgcattctggcgggaagcggagagggcagaggaagtctgctaacatgcggtgacgtcgaggagaatcctggacctatgaagaatcccaaaaaaaagagcggcggctttagaatcgtgaacatgttgaaaagaggagttgctagagtcaatcctctcggtgggctaaaacgcttacctgcagggttgttactgggccatggacccatcagaatggttttggcgatactagccttcttgagattcacagcaatcaaaccatcactgggcctcatcaatagatggggttccgtggggaagaaggaggctatggaaataataaaaaagttcaagaaagaccttgctgccatgttgagaattatcaatgctaggaaggagaggaagagacgtggcgctgacaccagcatcggaatcgtcggcctcctgctgaccacagccatggcagccgagatcactagacgtgggagtgcatactacatgtacttggacaggagcgatgctggtaaggccatttcttttgccaccacattgggggtgaacaaatgccatgtacagatcatggacctcgggcacatgtgtgacgccaccatgagttatgagtgccccatgctagacgagggagtggagccagatgacgtcgattgctggtgcaacacgacatcgacttgggttgtgtacggaacctgtcatcataaaaaaggtgaagcacgacgatccagaagagccgtgacgcttccttctcactccacgaggaagctgcaaacgcgatcgcagacttggctagagtcaagagaatacacaaagcacctgatcaaggttgaaaattggatatttaggaaccccgggtttgcgctagtggctgtagctatagcctggctcctgggaagctcgacgagccaaaaagttatatacttggtcatgatattgttgattgccccggcatacagcattaggtgcataggagttagcaatagagacttcgtggagggcatgtcaggtgggacctgggttgatgttgtcttggaacatgggggttgcgtcaccgtgatggcacaggacaagccaacagttgatatcgagttggtcacgacaacggttagcaacatggccgaggtaagatcctactgctatgaggcatcaatatcggacatggcttcggacagccgttgtccaacacaaggtgaagcctaccttgacaagcagtcagacactcaatatgtctgcaagagaacattggtggatagaggttggggaaatgggtgtggactttttggcaaagggagcttggtgacatgtgccaagtttacgtgctccaagaaaatgacaggcaagagcatccagccggagaacttggagtaccggataatgctatcagtgcatggatcccagcacagtgggatgattgtgaatgacacaggacatgaaactgacgaaaacagagcaaaagtcgaggtcacacccaattcaccaagagcagaagcaaccttgggaggttttggaagcttgggacttgactgtgaaccaaggacaggccttgacttctcagacctgtattacctgaccatgaacaataagcattggttggtgcacaaggagtggtttcatgacatcccattaccttggcatgctggtgcagacactggaactccacactggaacaacaaagaggcattggtggagttcaaggacgcccacgccaagaggcaaactgttgtggttctggggagccaagagggagctgttcatacggccctcgctggagctttggaggctgagatggatggtgcaaagggaaggctattctctggccatttgaaatgccgcctaaaaatggacaagcttaggttgaagggtgtgtcatattccctgtgtaccgcagcgttcacatttaccaaggtcccagctgaaacattgcatggaacagtcacagtggaggtgcagtatgcagggacagacggaccctgcaaagtcccagcccagatggcggtggacatgcagaccctgaccccagttggaaggctgataaccgccaatcctgtgatcactgaaagtactgagaattcaaagatgatgttggagctcgacccaccatttggggattcttacattgtcataggagtcggggacaagaaaatcacccatcactggcatcggagtggtagcaccatcggaaaggcatttgaagccactgtgagaggtgccaagagaatggcagtcttgggggacacagcctgggactttggatcagttgggggtgtgtttaattcattgggtaagggtattcaccaaatctttggagcagctttcaaatcactgtttggaggaatgtcctggttctcacagatcctcataggcacactgttggtgtggttaggtttgaacacaaagaatggatctatctccctcacatgcttagccctggggggagtgatgatcttcctttccacggctgtttctgctgatgttgggtgctcggtggacttctcaaaaaaggaaacgagatgtggcacgggggtgttcgtctacaatgacgttgaagcctggagggaccggtacaagtaccatcctgactccccccgcagattggcagcagctgttaagcaggcttgggaagaggggatttgtgggatctcctccgtttcgagaatggaaaacatcatgtggaaatcagtggaaggggagcttaatgcaatcctagaggagaatggagttcaactgacagttgtagtggggtctgtaaaaaaccctatgtggagaggtccacagagattgccagtgcctgtgaatgagctgccccatggctggaaagcctgggggaaatcgtactttgtcagagcagcaaagaccaacaacagttttgttgtcgacggtgacacactgaaggagtgtccgctcaaacatagagcatggaatagcttccttgtggaggatcacgggtttgggatcttccacaccagtgtttggctgaaggtcagagaggactactcactagagtgtgacccagccgtcataggaacagctgtcaagggaaaggaagctgcacacagtgatctaggctattggattgagagtgaaaagaatgacacatggaggctgaggagggctcatctgattgagatgaaaacatgtgagtggccaaagtctcacacactgtggacagatggagtggaagaaagtgatctgatcatacccaagtccttagctggtccactcagccaccacaacaccagagagggttacagaactcaagtgaaagggccatggcatagtgaagagctcgaaatccggtttgaggagtgcccaggaaccaaggttcacgtggaggagacatgcggaactagaggaccatctctgagatcaactactgctagtggaagggtcatagaggaatggtgctgtagggaatgcacaatgcctccactatcgttccgggcgaaagacggctgctggtatggaatggagataaggcccagaaaggaaccagagagcaacttagtgaggtccatggtgacagcaggatcaaccgatcatatggatcacttctctcttggagtgcttgtgattctactcatggtgcaggaaggtttgaagaagagaatgaccacaaagatcataatgagcacatcaatggcagtgctggtagccatggtcttgggaggattctcaatgagtgacctggctaagcttgtgatcctgatgggtgctactttcgcagaaatgaacactggaggagatgtagctcacttggcattggttgcggcatttaaagtcagaccagccttgttggtttccttcatcttcagagccaactggacaccccgtgagagcatgctgctagccctggcttcgtgcctcctgcagactgcgatctctgctcttgaaggcgagctgatggtcctcgttaatggatttgctttggcctggttggcaatacgagcaatggccgtgccacgcactgacaatatcgctctggcaattctggctgctctaacaccattagccagaggcacactgctcgtggcatggagagcgggcctcgccacttgtggagggttcatgctcctttccctgaaagggaaaggtagtgtgaagaagaacctgccttttgtcatggccttggggttgaccgctgtgaggatagtggaccccatcaatgtggtaggactactgttactcacaaggagtggaaaacggagctggcctcctagtgaagtgcttacagctgttggcctgatatgtgcactggccggagggtttgccaaggcagacatagagatggctgggcccatggctgcagtgggcctgctaattgtcagttatgtggtctcgggaaagagtgtggacatgtacatcgaaagagcaggtgacatcacatgggaaaaagacgcggaagtcactggaaacagtcctcggcttgacgtggcactagatgagagtggtgatttctccttggtagaggaggatggcccacccatgagagagatcatactcaaggtggttctgatggccatctgtggcatgaacccaatagccatacccttcgctgcaggagcgtggtatgtgtatgtaaagactggaaaaaggagtggtgccctctgggacgtgcctgctcccaaagaagtgaaaaaaggagagactacagatggagtgtacagagtgatgactcgcagactgctgggttcaacacaggttggagtgggagtcatgcaagagggagtcttccacaccatgtggcacgtcacaaaaggagccgcattgaggagcggtgaaggaagacttgatccatattggggggacgtcaagcaggacttggtgtcatattgtgggccttggaagttggatgcagcctgggatggactaagtgaagtgcagcttttggccgtaccccccggagagagggctagaaacattcagactctgcctggaatattcaagacaaaggatggggacatcggagcagtcgctctagactaccccgcaggaacctcaggatctccaatcctagacaaatgcggaagagtgataggactttatggcaatggggttgtgatcaagaatggaagctatgttagtgccataacccagggaaaaagggaggaggaggctccagttgagtgctttgaaccctcgatgctgaggaagaagcagctaacagtcttggatctgcatccaggagccgggaaaaccaggagggttcttcctgaaatagtccgtgaagccataaagaagagacttcgcacagtgatcctagcaccaaccagggtcgttgccgctgagatggaggaagccctaagaggactgccggtgcgttacatgacaacagcagtcaacgtcacccactctgggacagaaatcgtcgatttgatgtgccatgccaccttcacttcacgcctactacaacccatcagagtccccaactacaacctttacatcatggatgaagctcatttcacagatccctcaagcatagctgcacgaggatatatatcaacaagggttgaaatgggcgaggcggctgctatcttcatgactgctacaccaccaggaacccgcgatgcgtttccggattccaactcaccaatcatggacacagaagtggaagttccagagagagcctggagctcaggctttgactgggtgacggatcattctgggaaaacaatttggtttgttccaagtgtgagaaacggaaatgaaatcgcagcctgtctgacaaaggctggaaagcgggtcatacagctcagcaggaagacttttgagacagagtttcagaagacaaaaaatcaagagtgggactttgtcataacaactgacatttcagagatgggtgccaatttcaaggctgaccgggtcatagattccaggagatgcctaaagccagtcatactcgatggcgagagagtcatcctggctgggcccatgcctgtcacgcatgccagtgctgctcagaggagaggacgtgtaggcaggaaccccaacaaacctggagatgagtacatgtatggaggtgggtgtgcagagactgatgaagaccatgcacactggcttgaagcaagaatgcttcttgacaacatttacctccaggatggcctcatagcctcgctctatcggcctgaggccgacaaggtagccgccattgagggagagttcaagctgaggacagagcaaaggaagacctttgtggaactcatgaagagaggagaccttcccgtttggctggcctatcaagtagcatctgccggaataacttacacagatagaagatggtgctttgatggcactaccaacaacaccataatggaagacagtgtaccagcagaggtgtggaccaagtatggagagaagagagtgcttaaaccgaggtggatggatgctagggtctgttcagatcatgcggctctgaagtcgttcaaagaatttgccgctgggaagagaggagcggctttgggagtaatggatgccctgggaacattgccaggacacatgacagagaggtttcaggaagccattgacaatctcgctgtgctcatgcgagcagagactggaagtaggccctacaaagcagcggcagctcaactgccggagaccttagagactatcatgcttctgggcttattgggaacagtttcgctaggaatcttctttgtcttgatgcggaacaagggcatcgggaagatgggcttcggaatggtaacccttggggccagcgcatggctcatgtggctttcggaaattgaaccagccagaatcgcatgtgtcctcattgtcgtgtttttgttgctggtggtgctcatacccgagccagagaagcaaagatctccccaggataatcaaatggcaatcatcatcatggtggcagttggccttctgggtttgataactgcaaatgaactcggatggctggaaaggacaaaaagtgatatagctcatctaatgggaaggaaagaagaggggacaaccatgggattctcaatggatattgatctgcggccagcctccgcctgggctatttatgccgcattgacaactctcatcaccccagccgtccaacatgcggtaaccacctcatacaacaactactccctgatggcgatggccacacaagctggagtgctgtttggcatgggcaaagggatgccattttatgcatgggactttggagtcccgctgctaatgatgggttgctactcacaattaacacccctgaccctgatagtggccatcattctgcttgtggcacactacatgtacttgatcccaggtttgcaggcagcagcagcacgtgctgcccagaagaggacagcagctggcatcatgaagaatcccgttgtggatggaatagtggtgactgacattgacacaatgacaattgacccccaagtggagaagaagatgggacaagtgttactcatagcagtagctgtctccagtgctgtgctactgcggaccgcttggggatggggggaggctggggctctgatcacagcagcaacctccaccttatgggaaggctctccaaacaaatactggaactcctccacagccacctcactgtgcaacatctttagaggaagttatttggcaggggcttcccttatttacacagtgacaagaaatgccggtctggttaagagacgtggaggtggaacgggagagaccctgggagagaagtggaaagcccgcctgaaccagatgtcggccttggagttctactcttacaaaaagtcaggcatcaccgaagtgtgtagggaggaggcgcgccgcgccctcaaggatggagtggccacaggaggacatgctgtatcccggggaagcgcaaagcttagatggttggtagagagaggatacctgcagccccatggaaaggttgttgaccttggatgtggcagaggaggctggagttattacgctgccaccatccgtaaagtgcaggaggtcagaggatacacaaagggaggtcctggccatgaagagcccatgctggtgcaaagctatgggtggaacatagttcgcctcaagagtggagtggacgtcttccacatggcggctgaaccgtgtgacactctgctgtgtgacataggcgagtcatcatccagtcctgaagtggaagagacgcgaacactcagagtgctctccatggtgggagactggcttgaaaaaagaccaggggccttctgcataaaggtgctgtgcccatacaccagcacaatgatggagaccatggagcgactgcaacgtaggcatgggggaggattagtcagagtgccattgtcccgcaactctacacatgagatgtattgggtctctggagccaaaagtaacatcataaagagtgtgtccaccacaagtcagctcctcttgggacgcatggaagggcctaggaggccagtgaaatatgaggaggatgtgaacctcggctcaggcacacgagctgtggcaagctgcgctgaggctcccaacatgaagatcattggtaggcgcattgagagaatccgcaatgaacatgcagagacatggttctttgatgaaaaccacccatacaggacatgggcctaccatgggagctacgaagcccccacgcaggggtcagcgtcatccctcgtgaacggggttgttagactcttgtcaaagccctgggatgtggtgactggagttacaggaatagctatgactgacaccacgccatacggccaacaaagagtcttcaaggaaaaagtggacaccagggtgccagatccccaagaaggcactcgccaagtgatgaacatggtatcgtcttggctatggaaggagctgggaaaacgcaagcgaccacgtgtctgcaccaaagaagagttcattaataaggtgcgcagcaatgcagcactgggagcaatatttgaagaggaaaaagaatggaagacagctgtagaagctgtgaatgatccaagattttgggctctagtggacaaggaaagagaacaccacctgagaggagagtgtcatagctgtgtgtacaacatgatgggcaaaagagaaaagaagcaaggagaattcgggaaagcaaaaggcagccgcgcaatctggtacatgtggttgggagccagatttttggagtttgaagctcttgggttcttgaacgaggaccactggatggggagagaaaactcaggaggtggcgttgaagggctaggactgcaaaggcttggatatatcctagaagaaatgaaccgggcaccaggaggaaagatgtatgcagatgacactgctggctgggacacccgcattagcaagtttgatctggagaatgaagccctgatcactaaccagatggaagaagggcacagagctctggcgttggccgtgattaaatacacataccaaaacaaagtggtgaaggttctcagaccagctgaaggagggaaaacagtcatggacatcatctcaagacaagaccagagagggagcggacaagttgttacttatgctctcaacacattcaccaacctggtggtgcagcttatccggaacatggaggctgaggaagtgctagagatgcatgatctgtggttgttgaggaagccagagaaagtgaccagatggttgcagagcaatggatgggacagactcaaacggatggcagttagtggagatgactgcgttgtaaagccaattgatgataggtttgcacatgccctcaggttcttgaatgacatgggaaaggttaggaaagacacacaggaatggaaaccctcgactggatggagcaattgggaagaggtcccgttctgttctcaccacttcaacaagctgcacctcaaggacgggagatccattgtggtcccctgccgccaccaagatgaactgattggccgagcccgtgtctcaccaggggcaggatggagcatccgggagactgcttgtcttgcaaaatcatatgcacagatgtggcagcttctttatttccacagaagagacctccgactgatggccaatgccatttgttcggctgtgccaattgactgggtaccaactgggagaaccacctggtcaatccatggaaagggagaatggatgactactgaggacatgctcatggtgtggaatagagtgtggattgaggagaacgaccacatggaggacaagacccctgtaacaaaatggacagacattccctatttgggaaaaagggaggacttatggtgtggatcccttatagggcatagacctcgcaccacttgggctgagaacatcaaagacacagtcaacatggtgcgtaggatcataggtgatgaagaaaagttcatggactacctatccacccaagtacgctacttgggtgaggaagggtccacacctggagtgctgtaagcatcaatttcaatgttgtcaggcctgctagtcagccacagtttggggaaagctgtgcagcctgtaacccccccaggagaagctgggaaaccaagctcatagtcaggccgataacgccatggcacggaaaaagccatgctgcctgtgagcccctcagaggacactgagtcaaaaaaccccacgcgcttggaagcgcaggatgggaaaagaaggtggcgaccttccccaccctttaatctggggcctgaactggagattagctgtgaatctccggcagaaggactagtggttagaggagaccccccggaaaacgcaaaacagcatattgacgctgggaaagaccagagactccatgagtttccaccacgctggccgccaggcacagatcgccgaacagcggcggccggtgtggggaaatccatgggtct

SEQ ID NO: 16 - protein, 3653 aa, Artificial Sequence
  Synthetic Construct
MKNPKKKSGGFRIVNMLKRGVARVNPLGGLKRLPAGLLMVFTLEDFVGDWRQTAGYNLDQVLEQGGVSSLFQNLGVSVTPIQRIVLSGENGLKIDIHVIIPYEGLSGDQMGQIEKIFKVVYPVDDHHFKVILHYGTLVIDGVTPNMIDYFGRPYEGIAVFDGKKITVTGTLWNGNKIIDERLINPDGSLLFRVTINGVTGWRLCERILAGSGEGRGSLLTCGDVEENPGPMKNPKKKSGGFRIVNMLKRGVARVNPLGGLKRLPAGLLLGHGPIRMVLAILAFLRFTAIKPSLGLINRWGSVGKKEAMEIIKKFKKDLAAMLRIINARKERKRRGADTSIGIVGLLLTTAMAAEITRRGSAYYMYLDRSDAGKAISFATTLGVNKCHVQIMDLGHMCDATMSYECPMLDEGVEPDDVDCWCNTTSTWVVYGTCHHKKGEARRSRRAVTLPSHSTRKLQTRSQTWLESREYTKHLIKVENWIFRNPGFALVAVAIAWLLGSSTSQKVIYLVMILLIAPAYSIRCIGVSNRDFVEGMSGGTWVDVVLEHGGCVTVMAQDKPTVDIELVTTTVSNMAEVRSYCYEASISDMASDSRCPTQGEAYLDKQSDTQYVCKRTLVDRGWGNGCGLFGKGSLVTCAKFTCSKKMTGKSIQPENLEYRIMLSVHGSQHSGMIVNDTGHETDENRAKVEVTPNSPRAEATLGGFGSLGLDCEPRTGLDFSDLYYLTMNNKHWLVHKEWFHDIPLPWHAGADTGTPHWNNKEALVEFKDAHAKRQTVVVLGSQEGAVHTALAGALEAEMDGAKGRLFSGHLKCRLKMDKLRLKGVSYSLCTAAFTFTKVPAETLHGTVTVEVQYAGTDGPCKVPAQMAVDMQTLTPVGRLITANPVITESTENSKMMLELDPPFGDSYIVIGVGDKKITHHWHRSGSTIGKAFEATVRGAKRMAVLGDTAWDFGSVGGVFNSLGKGIHQIFGAAFKSLFGGMSWFSQILIGTLLVWLGLNTKNGSISLTCLALGGVMIFLSTAVSADVGCSVDFSKKETRCGTGVFVYNDVEAWRDRYKYHPDSPRRLAAAVKQAWEEGICGISSVSRMENIMWKSVEGELNAILEENGVQLTVVVGSVKNPMWRGPQRLPVPVNELPHGWKAWGKSYFVRAAKTNNSFVVDGDTLKECPLKHRAWNSFLVEDHGFGIFHTSVWLKVREDYSLECDPAVIGTAVKGKEAAHSDLGYWIESEKNDTWRLRRAHLIEMKTCEWPKSHTLWTDGVEESDLIIPKSLAGPLSHHNTREGYRTQVKGPWHSEELEIRFEECPGTKVHVEETCGTRGPSLRSTTASGRVIEEWCCRECTMPPLSFRAKDGCWYGMEIRPRKEPESNLVRSMVTAGSTDHMDHFSLGVLVILLMVQEGLKKRMTTKIIMSTSMAVLVAMVLGGFSMSDLAKLVILMGATFAEMNTGGDVAHLALVAAFKVRPALLVSFIFRANWTPRESMLLALASCLLQTAISALEGELMVLVNGFALAWLAIRAMAVPRTDNIALAILAALTPLARGTLLVAWRAGLATCGGFMLLSLKGKGSVKKNLPFVMALGLTAVRIVDPINVVGLLLLTRSGKRSWPPSEVLTAVGLICALAGGFAKADIEMAGPMAAVGLLIVSYVVSGKSVDMYIERAGDITWEKDAEVTGNSPRLDVALDESGDFSLVEEDGPPMREIILKVVLMAICGMNPIAIPFAAGAWYVYVKTGKRSGALWDVPAPKEVKKGETTDGVYRVMTRRLLGSTQVGVGVMQEGVFHTMWHVTKGAALRSGEGRLDPYWGDVKQDLVSYCGPWKLDAAWDGLSEVQLLAVPPGERARNIQTLPGIFKTKDGDIGAVALDYPAGTSGSPILDKCGRVIGLYGNGVVIKNGSYVSAITQGKREEEAPVECFEPSMLRKKQLTVLDLHPGAGKTRRVLPEIVREAIKKRLRTVILAPTRVVAAEMEEALRGLPVRYMTTAVNVTHSGTEIVDLMCHATFTSRLLQPIRVPNYNLYIMDEAHFTDPSSIAARGYISTRVEMGEAAAIFMTATPPGTRDAFPDSNSPIMDTEVEVPERAWSSGFDWVTDHSGKTIWFVPSVRNGNEIAACLTKAGKRVIQLSRKTFETEFQKTKNQEWDFVITTDISEMGANFKADRVIDSRRCLKPVILDGERVILAGPMPVTHASAAQRRGRVGRNPNKPGDEYMYGGGCAETDEDHAHWLEARMLLDNIYLQDGLIASLYRPEADKVAAIEGEFKLRTEQRKTFVELMKRGDLPVWLAYQVASAGITYTDRRWCFDGTTNNTIMEDSVPAEVWTKYGEKRVLKPRWMDARVCSDHAALKSFKEFAAGKRGAALGVMDALGTLPGHMTERFQEAIDNLAVLMRAETGSRPYKAAAAQLPETLETIMLLGLLGTVSLGIFFVLMRNKGIGKMGFGMVTLGASAWLMWLSEIEPARIACVLIVVFLLLVVLIPEPEKQRSPQDNQMAIIIMVAVGLLGLITANELGWLERTKSDIAHLMGRKEEGTTMGFSMDIDLRPASAWAIYAALTTLITPAVQHAVTTSYNNYSLMAMATQAGVLFGMGKGMPFYAWDFGVPLLMMGCYSQLTPLTLIVAIILLVAHYMYLIPGLQAAAARAAQKRTAAGIMKNPVVDGIVVTDIDTMTIDPQVEKKMGQVLLIAVAVSSAVLLRTAWGWGEAGALITAATSTLWEGSPNKYWNSSTATSLCNIFRGSYLAGASLIYTVTRNAGLVKRRGGGTGETLGEKWKARLNQMSALEFYSYKKSGITEVCREEARRALKDGVATGGHAVSRGSAKLRWLVERGYLQPHGKVVDLGCGRGGWSYYAATIRKVQEVRGYTKGGPGHEEPMLVQSYGWNIVRLKSGVDVFHMAAEPCDTLLCDIGESSSSPEVEETRTLRVLSMVGDWLEKRPGAFCIKVLCPYTSTMMETMERLQRRHGGGLVRVPLSRNSTHEMYWVSGAKSNIIKSVSTTSQLLLGRMEGPRRPVKYEEDVNLGSGTRAVASCAEAPNMKIIGRRIERIRNEHAETWFFDENHPYRTWAYHGSYEAPTQGSASSLVNGVVRLLSKPWDVVTGVTGIAMTDTTPYGQQRVFKEKVDTRVPDPQEGTRQVMNMVSSWLWKELGKRKRPRVCTKEEFINKVRSNAALGAIFEEEKEWKTAVEAVNDPRFWALVDKEREHHLRGECHSCVYNMMGKREKKQGEFGKAKGSRAIWYMWLGARFLEFEALGFLNEDHWMGRENSGGGVEGLGLQRLGYILEEMNRAPGGKMYADDTAGWDTRISKFDLENEALITNQMEEGHRALALAVIKYTYQNKVVKVLRPAEGGKTVMDIISRQDQRGSGQVVTYALNTFTNLVVQLIRNMEAEEVLEMHDLWLLRKPEKVTRWLQSNGWDRLKRMAVSGDDCVVKPIDDRFAHALRFLNDMGKVRKDTQEWKPSTGWSNWEEVPFCSHHFNKLHLKDGRSIVVPCRHQDELIGRARVSPGAGWSIRETACLAKSYAQMWQLLYFHRRDLRLMANAICSAVPIDWVPTGRTTWSIHGKGEWMTTEDMLMVWNRVWIEENDHMEDKTPVTKWTDIPYLGKREDLWCGSLIGHRPRTTWAENIKDTVNMVRRIIGDEEKFMDYLSTQVRYLGEEGSTPGVL

SEQ ID NO: 17 - DNA, 11425 bp, Artificial Sequence
  recombinant flavivirus
  CDS (95)..(10963)
agttgttagtctacgtggaccgacaagaacagtttcgaatcggaagcttgcttaacgtagttctaacagttttttattagagagcagatctctgatgaacaaccaacggaaaaagacgggtcgaccgtctttcaatatgctgaaacgcgcgagaaaccgcgtgtcaactgtttcacagttggcgaagagattctcaaaaggattgcttatggtcttcacactcgaagatttcgttggggactggcgacagacagccggctacaacctggaccaagtccttgaacagggaggtgtgtccagtttgtttcagaatctcggggtgtccgtaactccgatccaaaggattgtcctgagcggtgaaaatgggctgaagatcgacatccatgtcatcatcccgtatgaaggtctgagcggcgaccaaatgggccagatcgaaaaaatttttaaggtggtgtaccctgtggatgatcatcactttaaggtgatcctgcactatggcacactggtaatcgacggggttacgccgaacatgatcgactatttcggacggccgtatgaaggcatcgccgtgttcgacggcaaaaagatcactgtaacagggaccctgtggaacggcaacaaaattatcgacgagcgcctgatcaaccccgacggctccctgctgttccgagtaaccatcaacggagtgaccggctggcggctgtgcgaacgcattctggcgggaagcggagagggcagaggaagtctgctaacatgcggtgacgtcgaggagaatcctggacctatgaataatcagagaaagaaaacaggaaggccaagctttaacatgttaaagagagcccgtaatagagtcagtacagtgagtcaactcgccaaacgttttagtaagggtctcttgtcaggccaaggacccatgaaattggtgatggcttttatagcattcctaagatttctagccatacctccaacagcaggaattttggctagatggggctcattcaagaagaatggagcgatcaaagtgttacggggtttcaagaaagaaatctcaaacatgttgaacataatgaacaggaggaaaagatctgtgaccatgctcctcatgctgctgcccacagccctggcgttccatctgaccacccgagggggagagccgcacatgatagttagcaagcaggaaagaggaaaatcacttttgtttaagacctctgcaggtgtcaacatgtgcacccttattgcaatggatttgggagagttatgtgaggacacaatgacctacaaatgcccccggatcactgagacggaaccagatgacgttgactgttggtgcaatgccacggagacatgggtgacctatggaacatgttctcaaactggtgaacaccgacgagacaaacgttccgtcgcactggcaccacacgtagggcttggtctagaaacaagaaccgaaacgtggatgtcctctgaaggcgcttggaaacaaatacaaaaagtggagacctgggctctgagacacccaggattcacggtgatagccctttttctagcacatgccataggaacatccatcacccagaaagggatcatttttattttgctgatgctggtaactccatccatggccatgcggtgcgtgggaataggcaacagagacttcgtggaaggactgtcaggagctacgtgggtggatgtggtactggagcatggaagttgcgtcactaccatggcaaaagacaaaccaacactggacattgaactcttgaagacggaggtcacaaaccctgccgtcctgcgcaaactgtgcattgaagctaaaatatcaaacaccaccaccgattcgagatgtccaacacaaggagaagccacgctggtggaagaacaggacacgaactttgtgtgtcgacgaacgttcgtggacagaggctggggcaatggttgtgggctattcggaaaaggtagcttaataacgtgtgctaagtttaagtgtgtgacaaaactggaaggaaagatagtccaatatgaaaacttaaaatattcagtgatagtcaccgtacacactggagaccagcaccaagttggaaatgagaccacagaacatggaacaactgcaaccataacacctcaagctcccacgtcggaaatacagctgacagactacggagctctaacattggattgttcacctagaacagggctagactttaatgagatggtgttgttgacaatggaaaaaaaatcatggctcgtccacaaacaatggtttctagacttaccactgccttggacctcgggggcttcaacatcccaagagacttggaatagacaagacttgctggtcacatttaagacagctcatgcaaaaaagcaggaagtagtcgtactaggatcacaagaaggagcaatgcacactgcgttgactggagcgacagaaatccaaacgtctggaacgacaacaatttttgcaggacacctgaaatgcagactaaaaatggataaactgactttaaaagggatgtcatatgtaatgtgcacagggtcattcaagttagagaaggaagtggctgagacccagcatggaactgttctagtgcaggttaaatacgaaggaacagatgcaccatgcaagatccccttctcgtcccaagatgagaagggagtaacccagaatgggagattgataacagccaaccccatagtcactgacaaagaaaaaccagtcaacattgaagcggagccaccttttggtgagagctacattgtggtaggagcaggtgaaaaagctttgaaactaagctggttcaagaagggaagcagtatagggaaaatgtttgaagcaactgcccgtggagcacgaaggatggccatcctgggagacactgcatgggacttcggttctataggaggggtgttcacgtctgtgggaaaactgatacaccagatttttgggactgcgtatggagttttgttcagcggtgtttcttggaccatgaagataggaatagggattctgctgacatggctaggattaaactcaaggagcacgtccctttcaatgacgtgtatcgcagttggcatggtcacactgtacctaggagtcatggttcaggcggactcgggatgtgtaatcaactggaaaggcagagaactcaaatgtggaagcggcatttttgtcaccaatgaagtccacacctggacagagcaatataaattccaggccgactcccctaagagactatcagcggccattgggaaggcatgggaggagggtgtgtgtggaattcgatcagccactcgtctcgagaacatcatgtggaagcaaatatcaaatgaattaaaccacatcttacttgaaaatgacatgaaatttacagtggtcgtaggagacgttagtggaatcttggcccaaggaaagaaaatgattaggccacaacccatggaacacaaatactcgtggaaaagctggggaaaagccaaaatcataggagcagatgtacagaataccaccttcatcatcgacggcccaaacaccccagaatgccctgataaccaaagagcatggaacatttgggaagttgaagactatggatttggaattttcacgacaaacatatggttgaaattgcgtgactcctacactcaagtgtgtgaccaccggctaatgtcagctgccatcaaggatagcaaagcagtccatgctgacatggggtactggatagaaagtgaaaagaacgagacttggaagttggcaagagcctccttcatagaagttaagacatgcatctggccaaaatcccacactctatggagcaatggagtcctggaaagtgagatgataatcccaaagatatatggaggaccaatatctcagcacaactacagaccaggatatttcacacaaacagcagggccgtggcacttgggcaagttagaactagattttgatttatgtgaaggtaccactgttgttgtggatgaacattgtggaaatcgaggaccatctcttagaaccacaacagtcacaggaaagacaatccatgaatggtgctgtagatcttgcacgttaccccccctacgtttcaaaggagaagacgggtgctggtacggcatggaaatcagaccagtcaaggagaaggaagagaacctagttaagtcaatggtctctgcagggtcaggagaagtggacagtttttcactaggactgctatgcatatcaataatgatcgaagaggtaatgagatccagatggagcagaaaaatgctgatgactggaacattggctgtgttcctccttctcacaatgggacaattgacatggaatgatctgatcaggctatgtatcatggttggagccaacgcttcagacaagatggggatgggaacaacgtacctagctttgatggccactttcagaatgagaccaatgttcgcagtcgggctactgtttcgcagattaacatctagagaagttcttcttcttacagttggattgagtctggtggcatctgtagaactaccaaattccttagaggagctaggggatggacttgcaatgggcatcatgatgttgaaattactgactgattttcagtcacatcagctatgggctaccttgctgtctttaacatttgtcaaaacaactttttcattgcactatgcatggaagacaatggctatgatactgtcaattgtatctctcttccctttatgcctgtccacgacttctcaaaaaacaacatggcttccggtgttgctgggatctcttggatgcaaaccactaaccatgtttcttataacagaaaacaaaatctggggaaggaaaagctggcctctcaatgaaggaattatggctgttggaatagttagcattcttctaagttcacttctcaagaatgatgtgccactagctggcccactaatagctggaggcatgctaatagcatgttatgtcatatctggaagctcggccgatttatcactggagaaagcggctgaggtctcctgggaagaagaagcagaacactctggtgcctcacacaacatactagtggaggtccaagatgatggaaccatgaaaataaaggatgaagagagagatgacacactcaccattctcctcaaagcaactctgctagcaatctcaggggtatacccaatgtcaataccggcgaccctctttgtgtggtatttttggcagaaaaagaaacagagatcaggagtgctatgggacacacccagccctccagaagtggaaagagcagtccttgatgatggcatttatagaattctccaaagaggattgttgggcaggtctcaagtaggagtaggagtttttcaagaaggcgtgttccacacaatgtggcacgtcaccaggggagctgtcctcatgtaccaagggaagagactggaaccaagttgggccagtgtcaaaaaagacttgatctcatatggaggaggttggaggtttcaaggatcctggaacgcgggagaagaagtgcaggtgattgctgttgaaccggggaagaaccccaaaaatgtacagacagcgccgggtaccttcaagacccctgaaggcgaagttggagccatagctctagactttaaacccggcacatctggatctcctatcgtgaacagagagggaaaaatagtaggtctttatggaaatggagtggtgacaacaagtggtacctacgtcagtgccatagctcaagctaaagcatcacaagaagggcctctaccagagattgaggacgaggtgtttaggaaaagaaacttaacaataatggacctacatccaggatcgggaaaaacaagaagataccttccagccatagtccgtgaggccataaaaagaaagctgcgcacgctagtcttagctcccacaagagttgtcgcttctgaaatggcagaggcgctcaagggaatgccaataaggtatcagacaacagcagtgaagagtgaacacacgggaaaggagatagttgaccttatgtgtcacgccactttcactatgcgtctcctgtctcctgtgagagttcccaattataatatgattatcatggatgaagcacatttcaccgatccagccagcatagcagccagagggtatatctcaacccgagtgggtatgggtgaagcagctgcgattttcatgacagccactccccccggatcggtggaggcctttccacagagcaatgcagttatccaagatgaggaaagagacattcctgaaagatcatggaactcaggctatgactggatcactgatttcccaggtaaaacagtctggtttgttccaagcatcaaatcaggaaatgacattgccaactgtttaagaaagaatgggaaacgggtggtccaattgagcagaaaaacttttgacactgagtaccagaaaacaaaaaataacgactgggactatgttgtcacaacagacatatccgaaatgggagcaaacttccgagccgacagggtaatagacccgaggcggtgcctgaaaccggtaatactaaaagatggcccagagcgtgtcattctagccggaccgatgccagtgactgtggctagcgccgcccagaggagaggaagaattggaaggaaccaaaataaggaaggcgatcagtatatttacatgggacagcctctaaaaaatgatgaggaccacgcccattggacagaagcaaaaatgctccttgacaacataaacacaccagaagggattatcccagccctctttgagccggagagagaaaagagtgcagcaatagacggggaatacagactacggggtgaagcgaggaaaacgttcgtggagctcatgagaagaggagatctacctgtctggctatcctacaaagttgcctcagaaggcttccagtactccgacagaaggtggtgctttgatggggaaaggaacaaccaggtgttggaggagaacatggacgtggagatctggacaaaagaaggagaaagaaagaaactacgaccccgctggctggatgccagaacatactctgacccactggctctgcgcgaattcaaagagttcgcagcaggaagaagaagcgtctcaggtgacctaatattagaaatagggaaacttccacaacatttaacgcaaagggcccagaacgccttggacaatctggttatgttgcacaactctgaacaaggaggaaaagcctatagacacgccatggaagaactaccagacaccatagaaacgttaatgctcctagctttgatagctgtgctgactggtggagtgacgttgttcttcctatcaggaaggggtctaggaaaaacatccattggcctactctgcgtgattgcctcaagtgcactgttatggatggccagtgtggaaccccattggatagcggcctctatcatactggagttctttctgatggtgttgcttattccagagccggacagacagcgcactccacaagacaaccagctagcatacgtggtgataggtctgttattcatgatattgacagtggcagccaatgagatgggattactggaaaccacaaagaaggacctggggattggtcatgcagctgctgaaaaccaccatcatgctgcaatgctggacgtagacctacatccagcttcagcctggactctctatgcagtggccacaacaattatcactcccatgatgagacacacaattgaaaacacaacggcaaatatttccctgacagctattgcaaaccaggcagctatattgatgggacttgacaagggatggccaatatcaaagatggacataggagttccacttctcgccttggggtgctattctcaggtgaacccgctgacgctgacagcggcggtatttatgctagtggctcattatgccataattggacccggactgcaagcaaaagctactagagaagctcaaaaaaggacagcagccggaataatgaaaaacccaactgtcgacgggatcgttgcaatagatttggaccctgtggtttacgatgcaaaatttgaaaaacagctaggccaaataatgttgttgatactttgcacatcacagatcctcctgatgcggaccacatgggccttgtgtgaatccatcacactagccactggacctctgaccacgctttgggagggatctccaggaaaattctggaacaccacgatagcggtgtccatggcaaacatttttaggggaagttatctagcaggagcaggtctggccttttcattaatgaaatctctaggaggaggtaggagaggcacgggagcccaaggggaaacactgggagaaaaatggaaaagacagctaaaccaattgagcaagtcagaattcaacacttacaaaaggagtgggattatagaggtggatagatctgaagccaaagaggggttaaaaagaggagaaacgactaaacacgcagtgtcgagaggaacggccaaactgaggtggtttgtggagaggaaccttgtgaaaccagaagggaaagtcatagacctcggttgtggaagaggtggctggtcatattattgcgctgggctgaagaaagtcacagaagtgaaaggatacacgaaaggaggacctggacatgaggaaccaatcccaatggcaacctatggatggaacctagtaaagctatactccgggaaagatgtattctttacaccacctgagaaatgtgacaccctcttgtgtgatattggtgagtcctctccgaacccaactatagaagaaggaagaacgttacgtgttctaaagatggtggaaccatggctcagaggaaaccaattttgcataaaaattctaaatccctatatgccgagtgtggtagaaactttggagcaaatgcaaagaaaacatggaggaatgctagtgcgaaatccactctcaagaaactccactcatgaaatgtactgggtttcatgtggaacaggaaacattgtgtcagcagtaaacatgacatctagaatgctgctaaatagattcacaatggctcacaggaagccaacatatgaaagagacgtggacttaggcgctggaacaagacatgtggcagtagaaccagaggtggccaacctagatatcattggccagaggatagagaatataaaaaatgaacacaaatcaacatggcattatgatgaggacaatccatacaaaacatgggcctatcatggatcatatgaggtcaagccatcaggatcagcctcatccatggtcaatggtgtggtgagactgctaaccaaaccatgggatgtcattcccatggtcacacaaatagccatgactgacaccacaccctttggacaacagagggtgtttaaagagaaagttgacacgcgtacaccaaaagcgaaacgaggcacagcacaaattatggaggtgacagccaggtggttatggggttttctctctagaaacaaaaaacccagaatctgcacaagagaggagttcacaagaaaagtcaggtcaaacgcagctattggagcagtgttcgttgatgaaaatcaatggaactcagcaaaagaggcagtggaagatgaacggttctgggaccttgtgcacagagagagggagcttcataaacaaggaaaatgtgccacgtgtgtctacaacatgatgggaaagagagagaaaaaattaggagagttcggaaaggcaaaaggaagtcgcgcaatatggtacatgtggttgggagcgcgctttttagagtttgaagcccttggtttcatgaatgaagatcactggttcagcagagagaattcactcagtggagtggaaggagaaggactccacaaacttggatacatactcagagacatatcaaagattccagggggaaatatgtatgcagatgacacagccggatgggacacaagaataacagaggatgatcttcagaatgaggccaaaatcactgacatcatggaacctgaacatgccctattggccacgtcaatctttaagctaacctaccaaaacaaggtagtaagggtgcagagaccagcgaaaaatggaaccgtgatggatgtcatatccagacgtgaccagagaggaagtggacaggttggaacctatggcttaaacaccttcaccaacatggaggcccaactaataagacaaatggagtctgagggaatcttttcacccagcgaattggaaaccccaaatctagccgaaagagtcctcgactggttgaaaaaacatggcaccgagaggctgaaaagaatggcaatcagtggagatgactgtgtggtgaaaccaattgatgacagatttgcaacagccttaacagctttgaatgacatgggaaaggtaagaaaagacataccgcaatgggaaccttcaaaaggatggaatgattggcaacaagtgcctttctgttcacaccatttccaccagctgattatgaaggatgggagggagatagtggtgccatgccgcaaccaagatgaacttgtaggtagggccagagtatcacaaggcgccggatggagcttgagagaaactgcatgcctaggcaagtcatatgcacaaatgtggcagctgatgtacttccacaggagagacttgagattagcggctaatgctatctgttcagccgttccagttgattgggtcccaaccagccgtaccacctggtcgatccatgcccaccatcaatggatgacaacagaagacatgttgtcagtgtggaatagggtttggatagaggaaaacccatggatggaggacaagactcatgtgtccagttgggaagacgttccatacctaggaaaaagggaagatcaatggtgtggatccctaataggcttaacagcacgagccacctgggccaccaacatacaagtggccataaaccaagtgagaaggctcattgggaatgagaattatctagacttcatgacatcaatgaagagattcaaaaacgagagtgatcccgaaggggcactctggtaagccaactcattcacaaaataaaggaaaataaaaaatcaaacaaggcaagaagtcaggccggattaagccatagcacggtaagagctatgctgcctgtgagccccgtccaaggacgtaaaatgaagtcaggccgaaagccacggttcgagcaagccgtgctgcctgtagctccatcgtggggatgtaaaaacccgggaggctgcaaaccatggaagctgtacgcatggggtagcagactagtggttagaggagacccctcccaagacacaacgcagcagcggggcccaacaccaggggaagctgtaccctggtggtaaggactagaggttagaggagaccccccgcacaacaacaaacagcatattgacgctgggagagaccagagatcctgctgtctctacagcatcattccaggcacagaacgccagaaaatggaatggtgctgttgaatcaacaggttct

SEQ ID NO: 18 - protein, 3622 aa, Artificial Sequence
  Synthetic Construct
MNNQRKKTGRPSFNMLKRARNRVSTVSQLAKRFSKGLLMVFTLEDFVGDWRQTAGYNLDQVLEQGGVSSLFQNLGVSVTPIQRIVLSGENGLKIDIHVIIPYEGLSGDQMGQIEKIFKVVYPVDDHHFKVILHYGTLVIDGVTPNMIDYFGRPYEGIAVFDGKKITVTGTLWNGNKIIDERLINPDGSLLFRVTINGVTGWRLCERILAGSGEGRGSLLTCGDVEENPGPMNNQRKKTGRPSFNMLKRARNRVSTVSQLAKRFSKGLLSGQGPMKLVMAFIAFLRFLAIPPTAGILARWGSFKKNGAIKVLRGFKKEISNMLNIMNRRKRSVTMLLMLLPTALAFHLTTRGGEPHMIVSKQERGKSLLFKTSAGVNMCTLIAMDLGELCEDTMTYKCPRITETEPDDVDCWCNATETWVTYGTCSQTGEHRRDKRSVALAPHVGLGLETRTETWMSSEGAWKQIQKVETWALRHPGFTVIALFLAHAIGTSITQKGIIFILLMLVTPSMAMRCVGIGNRDFVEGLSGATWVDVVLEHGSCVTTMAKDKPTLDIELLKTEVTNPAVLRKLCIEAKISNTTTDSRCPTQGEATLVEEQDTNFVCRRTFVDRGWGNGCGLFGKGSLITCAKFKCVTKLEGKIVQYENLKYSVIVTVHTGDQHQVGNETTEHGTTATITPQAPTSEIQLTDYGALTLDCSPRTGLDFNEMVLLTMEKKSWLVHKQWFLDLPLPWTSGASTSQETWNRQDLLVTFKTAHAKKQEVVVLGSQEGAMHTALTGATEIQTSGTTTIFAGHLKCRLKMDKLTLKGMSYVMCTGSFKLEKEVAETQHGTVLVQVKYEGTDAPCKIPFSSQDEKGVTQNGRLITANPIVTDKEKPVNIEAEPPFGESYIVVGAGEKALKLSWFKKGSSIGKMFEATARGARRMAILGDTAWDFGSIGGVFTSVGKLIHQIFGTAYGVLFSGVSWTMKIGIGILLTWLGLNSRSTSLSMTCIAVGMVTLYLGVMVQADSGCVINWKGRELKCGSGIFVTNEVHTWTEQYKFQADSPKRLSAAIGKAWEEGVCGIRSATRLENIMWKQISNELNHILLENDMKFTVVVGDVSGILAQGKKMIRPQPMEHKYSWKSWGKAKIIGADVQNTTFIIDGPNTPECPDNQRAWNIWEVEDYGFGIFTTNIWLKLRDSYTQVCDHRLMSAAIKDSKAVHADMGYWIESEKNETWKLARASFIEVKTCIWPKSHTLWSNGVLESEMIIPKIYGGPISQHNYRPGYFTQTAGPWHLGKLELDFDLCEGTTVVVDEHCGNRGPSLRTTTVTGKTIHEWCCRSCTLPPLRFKGEDGCWYGMEIRPVKEKEENLVKSMVSAGSGEVDSFSLGLLCISIMIEEVMRSRWSRKMLMTGTLAVFLLLTMGQLTWNDLIRLCIMVGANASDKMGMGTTYLALMATFRMRPMFAVGLLFRRLTSREVLLLTVGLSLVASVELPNSLEELGDGLAMGIMMLKLLTDFQSHQLWATLLSLTFVKTTFSLHYAWKTMAMILSIVSLFPLCLSTTSQKTTWLPVLLGSLGCKPLTMFLITENKIWGRKSWPLNEGIMAVGIVSILLSSLLKNDVPLAGPLIAGGMLIACYVISGSSADLSLEKAAEVSWEEEAEHSGASHNILVEVQDDGTMKIKDEERDDTLTILLKATLLAISGVYPMSIPATLFVWYFWQKKKQRSGVLWDTPSPPEVERAVLDDGIYRILQRGLLGRSQVGVGVFQEGVFHTMWHVTRGAVLMYQGKRLEPSWASVKKDLISYGGGWRFQGSWNAGEEVQVIAVEPGKNPKNVQTAPGTFKTPEGEVGAIALDFKPGTSGSPIVNREGKIVGLYGNGVVTTSGTYVSAIAQAKASQEGPLPEIEDEVFRKRNLTIMDLHPGSGKTRRYLPAIVREAIKRKLRTLVLAPTRVVASEMAEALKGMPIRYQTTAVKSEHTGKEIVDLMCHATFTMRLLSPVRVPNYNMIIMDEAHFTDPASIAARGYISTRVGMGEAAAIFMTATPPGSVEAFPQSNAVIQDEERDIPERSWNSGYDWITDFPGKTVWFVPSIKSGNDIANCLRKNGKRVVQLSRKTFDTEYQKTKNNDWDYVVTTDISEMGANFRADRVIDPRRCLKPVILKDGPERVILAGPMPVTVASAAQRRGRIGRNQNKEGDQYIYMGQPLKNDEDHAHWTEAKMLLDNINTPEGIIPALFEPEREKSAAIDGEYRLRGEARKTFVELMRRGDLPVWLSYKVASEGFQYSDRRWCFDGERNNQVLEENMDVEIWTKEGERKKLRPRWLDARTYSDPLALREFKEFAAGRRSVSGDLILEIGKLPQHLTQRAQNALDNLVMLHNSEQGGKAYRHAMEELPDTIETLMLLALIAVLTGGVTLFFLSGRGLGKTSIGLLCVIASSALLWMASVEPHWIAASIILEFFLMVLLIPEPDRQRTPQDNQLAYVVIGLLFMILTVAANEMGLLETTKKDLGIGHAAAENHHHAAMLDVDLHPASAWTLYAVATTIITPMMRHTIENTTANISLTAIANQAAILMGLDKGWPISKMDIGVPLLALGCYSQVNPLTLTAAVFMLVAHYAIIGPGLQAKATREAQKRTAAGIMKNPTVDGIVAIDLDPVVYDAKFEKQLGQIMLLILCTSQILLMRTTWALCESITLATGPLTTLWEGSPGKFWNTTIAVSMANIFRGSYLAGAGLAFSLMKSLGGGRRGTGAQGETLGEKWKRQLNQLSKSEFNTYKRSGIIEVDRSEAKEGLKRGETTKHAVSRGTAKLRWFVERNLVKPEGKVIDLGCGRGGWSYYCAGLKKVTEVKGYTKGGPGHEEPIPMATYGWNLVKLYSGKDVFFTPPEKCDTLLCDIGESSPNPTIEEGRTLRVLKMVEPWLRGNQFCIKILNPYMPSVVETLEQMQRKHGGMLVRNPLSRNSTHEMYWVSCGTGNIVSAVNMTSRMLLNRFTMAHRKPTYERDVDLGAGTRHVAVEPEVANLDIIGQRIENIKNEHKSTWHYDEDNPYKTWAYHGSYEVKPSGSASSMVNGVVRLLTKPWDVIPMVTQIAMTDTTPFGQQRVFKEKVDTRTPKAKRGTAQIMEVTARWLWGFLSRNKKPRICTREEFTRKVRSNAAIGAVFVDENQWNSAKEAVEDERFWDLVHRERELHKQGKCATCVYNMMGKREKKLGEFGKAKGSRAIWYMWLGARFLEFEALGFMNEDHWFSRENSLSGVEGEGLHKLGYILRDISKIPGGNMYADDTAGWDTRITEDDLQNEAKITDIMEPEHALLATSIFKLTYQNKVVRVQRPAKNGTVMDVISRRDQRGSGQVGTYGLNTFTNMEAQLIRQMESEGIFSPSELETPNLAERVLDWLKKHGTERLKRMAISGDDCVVKPIDDRFATALTALNDMGKVRKDIPQWEPSKGWNDWQQVPFCSHHFHQLIMKDGREIVVPCRNQDELVGRARVSQGAGWSLRETACLGKSYAQMWQLMYFHRRDLRLAANAICSAVPVDWVPTSRTTWSIHAHHQWMTTEDMLSVWNRVWIEENPWMEDKTHVSSWEDVPYLGKREDQWCGSLIGLTARATWATNIQVAINQVRRLIGNENYLDFMTSMKRFKNESDPEGALW

SEQ ID NO: 19 - DNA, 11413 bp, Artificial Sequence
  recombinant flavivirus
  CDS (97)..(10962)
agttgttagtctacgtggaccgacaaagacagattctttgagggagctaagctcaacgtagttctaacagttttttaattagagagcagatctctgatgaataaccaacgaaaaaaggcgagaaatacgcctttcaatatgctgaaacgcgagagaaaccgcgtgtcgactgtacaacagctgacaaagagattctcacttggaatgctgatggtcttcacactcgaagatttcgttggggactggcgacagacagccggctacaacctggaccaagtccttgaacagggaggtgtgtccagtttgtttcagaatctcggggtgtccgtaactccgatccaaaggattgtcctgagcggtgaaaatgggctgaagatcgacatccatgtcatcatcccgtatgaaggtctgagcggcgaccaaatgggccagatcgaaaaaatttttaaggtggtgtaccctgtggatgatcatcactttaaggtgatcctgcactatggcacactggtaatcgacggggttacgccgaacatgatcgactatttcggacggccgtatgaaggcatcgccgtgttcgacggcaaaaagatcactgtaacagggaccctgtggaacggcaacaaaattatcgacgagcgcctgatcaaccccgacggctccctgctgttccgagtaaccatcaacggagtgaccggctggcggctgtgcgaacgcattctggcgggaagcggagagggcagaggaagtctgctaacatgcggtgacgtcgaggagaatcctggacctatgaacaatcagaggaagaaagcacgcaacacaccatttaacatgttaaagagagaacgcaatagagtcagtacagtgcagcaattaaccaaacgctttagtttgggtatgttacagggacgaggaccattaaaactgttcatggccctggtggcgttccttcgtttcctaacaatcccaccaacagcagggatactgaagagatggggaacaattaaaaaatcaaaagccattaatgttttgagagggttcaggaaagagattggaaggatgctgaacatcttgaacaggagacgcagaactgcaggcatgatcattatgctgattccaacagtgatggcgttccatttaaccacacgtaacggagaaccacacatgatcgtcagtagacaagagaaagggaaaagtcttctgtttaaaacagaggatggtgtgaacatgtgtaccctcatggccatggaccttggtgaattgtgtgaagatacaatcacgtacaagtgtccttttctcaggcagaatgaaccagaagacatagattgttggtgcaactctacgtccacatgggtaacttatgggacgtgtaccaccacaggagaacacagaagagaaaaaagatcagtggcactcgttccacatgtgggaatgggactggagacacgaactgaaacatggatgtcatcagaaggggcctggaaacatgcccagagaattgaaacttggatcttgagacatccaggctttaccataatggcagcaatcctggcatacaccataggaacgacacatttccaaagagccctgattttcatcttactgacagctgtcgctccttcaatgacaatgcgttgcataggaatatcaaatagagactttgtagaaggggtttcaggaggaagctgggttgacatagtcttagaacatggaagctgtgtgacgacgatggcaaaaaacaaaccaacattggattttgaactgataaaaacagaagccaaacaacctgccactctaaggaagtactgtatagaggcaaagctgaccaacacaacaacagattctcgctgcccaacacaaggagaacccagcctaaatgaagagcaggacaaaaggttcgtctgcaaacactccatggtggacagaggatggggaaatggatgtggattatttggaaaaggaggcattgtgacctgtgctatgttcacatgcaaaaagaacatgaaaggaaaagtcgtgcaaccagaaaacttggaatacaccattgtgataacacctcactcaggggaagagcatgcagtcggaaatgacacaggaaaacatggcaaggaaatcaaaataacaccacagagttccatcacagaagcagagttgacaggctatggcactgtcacgatggagtgctctccgagaacgggcctcgacttcaatgagatggtgttgctgcaaatggaaaataaagcttggctggtgcacaggcaatggttcctagacctgccgttgccatggctgcccggagcggacacacaaggatcaaattggatacagaaagagacattggtcactttcaaaaatccccatgcgaagaaacaggatgttgttgttttgggatcccaagaaggggccatgcacacagcactcacaggggccacagaaatccagatgtcatcaggaaacttactgttcacaggacatctcaagtgcaggctgaggatggacaaactacagctcaaaggaatgtcatactctatgtgcacaggaaagtttaaagttgtgaaggaaatagcagaaacacaacatggaacaatagttatcagagtacaatatgaaggggacggttctccatgtaagatcccttttgagataatggatttggaaaaaagacatgttttaggtcgcctgattacagtcaacccaatcgtaacagaaaaagatagcccagtcaacatagaagcagaacctccattcggagacagctacatcatcataggagtagagccgggacaattgaagctcaactggtttaagaaaggaagttctatcggccaaatgattgagacaacaatgaggggagcgaagagaatggccattttaggtgacacagcttgggattttggatccctgggaggagtgtttacatctataggaaaggctctccaccaagttttcggagcaatctatggggctgccttcagtggggtctcatggactatgaaaatactcataggagtcattatcacatggataggaatgaattcacgcagcacctcactgtctgtgtcactagtattggtgggagtcgtgacgctgtatttgggagttatggtgcaggccgatagtggttgcgttgtgagctggaaaaacaaagaactgaagtgtggcagtgggattttcatcacagacaacgtgcacacatggacagaacaatacaagttccaaccagaatccccttcaaagctagcttcagctatccagaaagctcatgaagagggcatttgtggaatccgctcagtaacaagactggaaaatctgatgtggaaacaaataacaccagaattgaatcacattctatcagaaaatgaggtgaagttgactattatgacaggagacatcaaaggaatcatgcaggcaggaaaacgatctctgcagccccagcccactgagctgaagtattcatggaaaacatggggcaaagcgaaaatgctctctacagagtctcataaccagacctttctcattgatggccccgaaacagcagaatgccccaacacaaacagagcttggaattcgctggaagttgaagactatggctttggagtattcaccaccaatatatggctaaagttgagagaaaagcaggatgtattctgcgactcaaaactcatgtcagcggccataaaagacaacagagccgtccatgccgatatgggttattggatagaaagtgcactcaatgacacatggaagatagagaaagcctctttcatcgaagttaaaagctgccactggccaaagtcacacaccctctggagtaatggagtgttagaaagtgagatgataattccaaagaatttcgctggaccagtgtcacaacacaactacagaccaggctaccatacacaaacagcaggaccatggcatctaggtaagcttgagatggactttgatttctgcgaaggaaccacagtggtggtgactgaggactgtggaaatagaggaccctctttaagaacaactactgcctctggaaaactcataacagaatggtgctgccgatcttgcacattaccaccgctaagatacagaggtgaggacggatgctggtacgggatggaaatcagaccattgaaagagaaagaagagaatttggtcaactccttggtcacagccggacatgggcagattgacaacttttcactaggagtcttgggaatggcattgttcctggaagaaatgctcaggacccgagtaggaacgaaacatgcaatactactagttgcagtttcttttgtgacattgatcacagggaacatgtcctttagagacctgggaagagtgatggttatggtgggcgctactatgacggatgacataggtatgggcgtgacttatcttgccctactagcagccttcaaagtcagaccaacttttgcagctggactactcttgagaaagttgacctccaaggaattgatgatgactaccataggaatcgtactcctctcccagagcaccataccagagaccattcttgaactgactgatgcgttagccttgggcatgatggtccttaaaatggtgagaaaaatggaaaagtatcaattggcagtgactatcatggctatcttgtgcgtcccaaatgcagtgatattacaaaacgcatggaaagtgagttgcacaatattggcagtggtgtccgtttccccactgttcttaacatcctcacagcagaaagcggattggataccattagcattgacgatcaagggtctcaatccaacagctatttttctaacaaccctttcaagaaccaacaagaaaaggagctggccactaaatgaggctatcatggcagtcgggatggtgagcattttggccagttcactcctaaagaatgacattcccatgacaggaccattagtggctggagggctcctcactgtgtgctacgtgctcactggacgatcggccgatttggaactggagagagccgccgatgtcaaatgggaagatcaggcagagatatcaggaagcagtccaatcctgtcaataacaatatcagaagatggtagcatgtcgataaaaaacgaagaggaagaacaaacactgaccatactcattagaacaggattgctggtgatctcaggactttttcctgtatcaataccaatcacggcagcagcatggtacctgtgggaagtgaagaaacaacgggctggagtattgtgggatgtcccttcacccccacccgtgggaaaggctgaactggaagatggagcctatagaatcaagcaaaaagggattcttggatattcccagatcggagccggagtttacaaagaaggaacattccatacaatgtggcatgtcacacgcggcgctgttctaatgcataaaggaaagaggattgaaccatcatgggcggacgttaagaaagacctaatatcatatggaggaggctggaagctagaaggagaatggaaggaaggagaagaagtccaggtcttggcattggagcctggaaaaaatccaagagccgtccaaacaaaacctggtcttttcaaaaccaacgccggaaccataggtgccgtatctctggacttttctcctggaacctcaggatctccaatcatcgacaaaaaaggaaaagttgtgggtctttatggtaatggtgttgttacaaggagtggagcatatgtgagtgctatagcccagactgaaaaaagtattgaagacaatccagagatcgaagatgatatttttcgaaagagaaaattgaccatcatggacctccacccaggagcgggaaagacgaagagataccttccggccatagtcagagaggctataaaacggggcctgaggacattaatcctggcccccactagagtcgtggcagctgaaatggaggaagccctaagaggacttccaataagataccaaaccccagccatcagagctgagcacaccgggcgggagattgtggacctaatgtgtcatgccacattcactatgaggctgctatcaccagttagagtgccaaattacaacctgatcatcatggacgaagcccatttcacagacccagcaagtatagcggctagaggatacatctcaactcgagtagagatgggtgaggcagctgggattttcatgacagccactcctccgggaagcagagacccattccctcagagcaatgcaccaatcatggatgaagaaagagaaatccctgaacgttcgtggagttctggacatgagtgggtcacggattttaaagggaagactgtttggttcgttccaagtataaaagcaggaaatgatatagcagcttgcctgagaaaaaatggaaagaaagtgatacaactcagtaggaagacctttgattctgagtatgtcaagactagaaccaatgattgggacttcgtggtcacaactgacatttcagaaatgggtgccaacttcaaggctgagagggttatagaccccagacgctgcatgaaaccagttatactaacagatggtgaagagcgggtgatcctggcaggacctatgccagtgacccactctagtgcagcacaaagaagagggagaataggaagaaatccaaaaaatgaaaatgaccagtacatatacatgggggaacctctggaaaatgatgaagactgtgcacactggaaagaagctaaaatgctcctagataacatcaacacacctgaaggaatcattcctagcatgttcgaaccagagcgtgaaaaggtggatgccattgatggtgaataccgcttgagaggagaagcaaggaaaacctttgtggacctaatgagaagaggagacctaccagtctggttggcctacagagtggcagctgaaggcatcaactacgcagacagaaggtggtgttttgatggaattaagaacaaccaaatcttggaagaaaatgtggaggtggaaatctggacaaaagaaggggaaaggaagaaattaaaacccagatggttggatgccaggatctactctgacccactgacgctaaaggaattcaaggagtttgcagctggaagaaagtccctgaccctgaacctaatcacagaaatgggtaggcttccaactttcatgactcagaaggcaagagacgcactggacaacttagcagtgctgcacacggctgaagcaggtggaagggcgtacaatcatgctctcagtgaactgccggagaccctggagacattgcttttactgacacttctggctacagtcacaggaggaatctttttattcttgatgagcggaaggggtatagggaagatgaccctgggaatgtgctgcataatcacggccagtattctcctatggtacgcacaaatacagccacactggatagcagcttcaataatactggagttttttctcatagttttgcttattccagaaccagaaaagcagagaacaccccaagataaccaattgacctacgttgtcatagccatcctcacagtggtggccgcaaccatggcaaacgagatgggtttcctggaaaaaacgaagaaagatctcggattgggaagcattacaacccagcaacccgagagcaacatcctggacatagatctacgtcccgcatcagcatggacgctgtatgctgtggccacaacatttgtcacaccaatgttgagacacagcattgaaaattcctcagtgaacgtgtccctaacagctattgccaaccaagccacagtgttaatgggtcttgggaaaggatggccattgtcaaagatggacatcggagttccccttctcgccattggatgctactcacaagtcaaccccataactctcacagcagctcttttcttactggtagcacattatgccatcatagggccaggactccaagcaaaagcaaccagggaagctcagaaaagagcagcagcgggcatcatgaaaaacccaactgtcgatggaataacagtgattgacctagatccaataccctatgatccaaagtttgaaaagcagttgggacaagtaatgctcctagtcctctgcgtgactcaagtgttgatgatgaggactacatgggctctgtgtgaggcgttaaccttagcgaccgggcctatctccacattgtgggaaggaaatccagggaggttttggaacactaccattgcagtgtcaatggctaacatttttagagggagttacttggccggagctggacttctcttttccatcatgaagaacacaaccaacacgagaaggggaaccggtaacataggagagacgcttggagagaaatggaaaagccgattgaacgcattggggaaaagtgaattccagatctacaagaaaagtggaatccaggaagtggatagaaccttagcaaaagaaggcattaaaagaggagaaacggaccatcacgctgtgtcgcgaggctcagcaaaactgagatggttcgtcgagagaaatatggtcacaccagaagggaaagtagtggacctcggttgcggcagaggaggctggtcatactattgtgggggactaaagaatgtaagagaagtcaaaggcctgacaaaaggaggaccaggacatgaagaacccatccccatgtcaacatatgggtggaatctagtacgtcttcaaagtggagttgacgttttcttcactccgccagaaaagtgtgacacattgttgtgtgacataggggagtcgtcaccaaatcccacggtagaagcaggacgaacactcagagtccttaacttagtggaaaattggttgaacaacaacacccaattttgcataaaggttctcaacccatacatgccctcagtcatagaaaaaatggaagcactacaaaggaaatatggaggagccttagtgaggaatccactctcacgaaactccacacatgagatgtactgggtatccaatgcctccgggaacatagtgtcatcagtgaacatgatttcaaggatgttgatcaacagattcacaatgagacacaagaaagccacttacgagccagatgtagacctcggaagcggaacccgcaacatcggaattgaaagtgagataccaaacctagacataatcgggaaaagaatagaaaaaataaaacaagagcatgaaacatcatggcactatgaccaagaccacccatacaaaacgtgggcttaccatggcagctatgaaacaaaacaaactggatcagcatcatccatggtgaacggagtggtcagactgctgacaaaaccttgggacgtcgtccccatggtgacacagatggcaatgacagacacgactccatttggacaacagcgcgtttttaaagaaaaagtggacacgagaacccaagaaccgaaagaaggcacaaagaaactaatgaaaatcacggcagagtggctttggaaagaactagggaagaaaaagacacctaggatgtgcactagagaagaattcacaagaaaggtgagaagcaatgcagccttgggggccatattcactgatgagaacaagtggaagtcggcacgtgaggctgttgaagatagtaggttttgggagctggttgacaaggaaaggaatctccatcttgaaggaaagtgtgaaacatgtgtgtataacatgatgggaaaaagagagaagaagctaggggagttcggcaaggcaaaaggcagcagagccatatggtacatgtggcttggagcacgcttcttagagtttgaagccctaggattcttgaatgaagatcactggttctccagagagaactccttgagtggagtggaaggagaagggctgcacaagctaggttacattttaagagacgtgagcaagaaagagggaggagcaatgtatgccgatgacaccgcaggatgggacacaagaatcacactagaagacctaaaaaatgaagaaatggtaacaaaccacatggaaggagaacacaagaaactagccgaggccattttcaaattaacgtaccaaaacaaggtggtgcgtgtgcaaagaccaacaccaagaggcacagtaatggatatcatatcgagaagagaccaaagaggtagtggacaagttggtacctatggactcaatactttcaccaatatggaagcccaactaatcagacagatggagggagaaggagtcttcaaaagcattcagcacctgacagtcacagaagaaatcgccgtgcaaaactggttagcaagagtagggcgcgaaaggttatcaagaatggccatcagtggagatgattgtgttgtgaaacctttagatgacaggttcgcaagcgctttaacagctctaaatgacatgggaaaggttaggaaagacatacaacaatgggaaccttcaagaggatggaacgattggacacaagtgcccttctgttcacaccatttccatgagttaatcatgaaagacggacgcgtacttgtagttccatgcagaaaccaagatgaactgattggtagagcccgaatttcccaaggagctgggtggtctttgcgagagacggcctgtttggggaagtcctacgcccaaatgtggagcttgatgtacttccacagacgtgacctcaggctggcggctaatgctatttgctcggcagtcccatcacattgggttccaacaagtagaacaacctggtccatacacgccaaacatgaatggatgacaacggaagacatgctgacagtctggaacagggtgtggattcaagaaaacccatggatggaagacaaaactccagtggaatcatgggaggaaatcccatacttggggaaaagagaagaccaatggtgcggctcattgattgggctaacaagcagggccacctgggcaaagaacatccaaacagcaataaatcaagttagatcccttataggcaatgaggaatacacagattacatgccatccatgaaaagattcagaagagaagaggaagaggcaggagtcctgtggtagaaggcaaaactaacatgaaacaaggctagaagtcaggtcggattaagccatagtacggaaaaaactatgctacctgtgagccccgtccaaggacgttaaaagaagtcaggccattacaaatgccatagcttgagtaaactgtgcagcctgtagctccacctgagaaggtgtaaaaaatctgggaggccacaaaccatggaagctgtacgcatggcgtagtggactagcggttagaggagacccctcccttacaaatcgcagcaacaatgggggcccaaggtgagatgaagctgtagtctcactggaaggactagaggttagaggagacccccccaaaacaaaaaacagcatattgacgctgggaaagaccagagatcctgctgtctcctcagcatcattccaggcacagaacgccagaaaatggaatggtgctgttgaatcaacaggttct

SEQ ID NO: 20 - protein, 3621 aa, Artificial Sequence
  Synthetic Construct
MNNQRKKARNTPFNMLKRERNRVSTVQQLTKRFSLGMLMVFTLEDFVGDWRQTAGYNLDQVLEQGGVSSLFQNLGVSVTPIQRIVLSGENGLKIDIHVIIPYEGLSGDQMGQIEKIFKVVYPVDDHHFKVILHYGTLVIDGVTPNMIDYFGRPYEGIAVFDGKKITVTGTLWNGNKIIDERLINPDGSLLFRVTINGVTGWRLCERILAGSGEGRGSLLTCGDVEENPGPMNNQRKKARNTPFNMLKRERNRVSTVQQLTKRFSLGMLQGRGPLKLFMALVAFLRFLTIPPTAGILKRWGTIKKSKAINVLRGFRKEIGRMLNILNRRRRTAGMIIMLIPTVMAFHLTTRNGEPHMIVSRQEKGKSLLFKTEDGVNMCTLMAMDLGELCEDTITYKCPFLRQNEPEDIDCWCNSTSTWVTYGTCTTTGEHRREKRSVALVPHVGMGLETRTETWMSSEGAWKHAQRIETWILRHPGFTIMAAILAYTIGTTHFQRALIFILLTAVAPSMTMRCIGISNRDFVEGVSGGSWVDIVLEHGSCVTTMAKNKPTLDFELIKTEAKQPATLRKYCIEAKLTNTTTDSRCPTQGEPSLNEEQDKRFVCKHSMVDRGWGNGCGLFGKGGIVTCAMFTCKKNMKGKVVQPENLEYTIVITPHSGEEHAVGNDTGKHGKEIKITPQSSITEAELTGYGTVTMECSPRTGLDFNEMVLLQMENKAWLVHRQWFLDLPLPWLPGADTQGSNWIQKETLVTFKNPHAKKQDVVVLGSQEGAMHTALTGATEIQMSSGNLLFTGHLKCRLRMDKLQLKGMSYSMCTGKFKVVKEIAETQHGTIVIRVQYEGDGSPCKIPFEIMDLEKRHVLGRLITVNPIVTEKDSPVNIEAEPPFGDSYIIIGVEPGQLKLNWFKKGSSIGQMIETTMRGAKRMAILGDTAWDFGSLGGVFTSIGKALHQVFGAIYGAAFSGVSWTMKILIGVIITWIGMNSRSTSLSVSLVLVGVVTLYLGVMVQADSGCVVSWKNKELKCGSGIFITDNVHTWTEQYKFQPESPSKLASAIQKAHEEGICGIRSVTRLENLMWKQITPELNHILSENEVKLTIMTGDIKGIMQAGKRSLQPQPTELKYSWKTWGKAKMLSTESHNQTFLIDGPETAECPNTNRAWNSLEVEDYGFGVFTTNIWLKLREKQDVFCDSKLMSAAIKDNRAVHADMGYWIESALNDTWKIEKASFIEVKSCHWPKSHTLWSNGVLESEMIIPKNFAGPVSQHNYRPGYHTQTAGPWHLGKLEMDFDFCEGTTVVVTEDCGNRGPSLRTTTASGKLITEWCCRSCTLPPLRYRGEDGCWYGMEIRPLKEKEENLVNSLVTAGHGQIDNFSLGVLGMALFLEEMLRTRVGTKHAILLVAVSFVTLITGNMSFRDLGRVMVMVGATMTDDIGMGVTYLALLAAFKVRPTFAAGLLLRKLTSKELMMTTIGIVLLSQSTIPETILELTDALALGMMVLKMVRKMEKYQLAVTIMAILCVPNAVILQNAWKVSCTILAVVSVSPLFLTSSQQKADWIPLALTIKGLNPTAIFLTTLSRTNKKRSWPLNEAIMAVGMVSILASSLLKNDIPMTGPLVAGGLLTVCYVLTGRSADLELERAADVKWEDQAEISGSSPILSITISEDGSMSIKNEEEEQTLTILIRTGLLVISGLFPVSIPITAAAWYLWEVKKQRAGVLWDVPSPPPVGKAELEDGAYRIKQKGILGYSQIGAGVYKEGTFHTMWHVTRGAVLMHKGKRIEPSWADVKKDLISYGGGWKLEGEWKEGEEVQVLALEPGKNPRAVQTKPGLFKTNAGTIGAVSLDFSPGTSGSPIIDKKGKVVGLYGNGVVTRSGAYVSAIAQTEKSIEDNPEIEDDIFRKRKLTIMDLHPGAGKTKRYLPAIVREAIKRGLRTLILAPTRVVAAEMEEALRGLPIRYQTPAIRAEHTGREIVDLMCHATFTMRLLSPVRVPNYNLIIMDEAHFTDPASIAARGYISTRVEMGEAAGIFMTATPPGSRDPFPQSNAPIMDEEREIPERSWSSGHEWVTDFKGKTVWFVPSIKAGNDIAACLRKNGKKVIQLSRKTFDSEYVKTRTNDWDFVVTTDISEMGANFKAERVIDPRRCMKPVILTDGEERVILAGPMPVTHSSAAQRRGRIGRNPKNENDQYIYMGEPLENDEDCAHWKEAKMLLDNINTPEGIIPSMFEPEREKVDAIDGEYRLRGEARKTFVDLMRRGDLPVWLAYRVAAEGINYADRRWCFDGIKNNQILEENVEVEIWTKEGERKKLKPRWLDARIYSDPLTLKEFKEFAAGRKSLTLNLITEMGRLPTFMTQKARDALDNLAVLHTAEAGGRAYNHALSELPETLETLLLLTLLATVTGGIFLFLMSGRGIGKMTLGMCCIITASILLWYAQIQPHWIAASIILEFFLIVLLIPEPEKQRTPQDNQLTYVVIAILTVVAATMANEMGFLEKTKKDLGLGSITTQQPESNILDIDLRPASAWTLYAVATTFVTPMLRHSIENSSVNVSLTAIANQATVLMGLGKGWPLSKMDIGVPLLAIGCYSQVNPITLTAALFLLVAHYAIIGPGLQAKATREAQKRAAAGIMKNPTVDGITVIDLDPIPYDPKFEKQLGQVMLLVLCVTQVLMMRTTWALCEALTLATGPISTLWEGNPGRFWNTTIAVSMANIFRGSYLAGAGLLFSIMKNTTNTRRGTGNIGETLGEKWKSRLNALGKSEFQIYKKSGIQEVDRTLAKEGIKRGETDHHAVSRGSAKLRWFVERNMVTPEGKVVDLGCGRGGWSYYCGGLKNVREVKGLTKGGPGHEEPIPMSTYGWNLVRLQSGVDVFFTPPEKCDTLLCDIGESSPNPTVEAGRTLRVLNLVENWLNNNTQFCIKVLNPYMPSVIEKMEALQRKYGGALVRNPLSRNSTHEMYWVSNASGNIVSSVNMISRMLINRFTMRHKKATYEPDVDLGSGTRNIGIESEIPNLDIIGKRIEKIKQEHETSWHYDQDHPYKTWAYHGSYETKQTGSASSMVNGVVRLLTKPWDVVPMVTQMAMTDTTPFGQQRVFKEKVDTRTQEPKEGTKKLMKITAEWLWKELGKKKTPRMCTREEFTRKVRSNAALGAIFTDENKWKSAREAVEDSRFWELVDKERNLHLEGKCETCVYNMMGKREKKLGEFGKAKGSRAIWYMWLGARFLEFEALGFLNEDHWFSRENSLSGVEGEGLHKLGYILRDVSKKEGGAMYADDTAGWDTRITLEDLKNEEMVTNHMEGEHKKLAEAIFKLTYQNKVVRVQRPTPRGTVMDIISRRDQRGSGQVGTYGLNTFTNMEAQLIRQMEGEGVFKSIQHLTVTEEIAVQNWLARVGRERLSRMAISGDDCVVKPLDDRFASALTALNDMGKVRKDIQQWEPSRGWNDWTQVPFCSHHFHELIMKDGRVLVVPCRNQDELIGRARISQGAGWSLRETACLGKSYAQMWSLMYFHRRDLRLAANAICSAVPSHWVPTSRTTWSIHAKHEWMTTEDMLTVWNRVWIQENPWMEDKTPVESWEEIPYLGKREDQWCGSLIGLTSRATWAKNIQTAINQVRSLIGNEEYTDYMPSMKRFRREEEEAGVLW

SEQ ID NO: 21 - DNA, 11387 bp, Artificial Sequence
  recombinant flavivirus
  CDS (95)..(10954)
agttgttagtctacgtggaccgacaagaacagtttcgactcggaagcttgcttaacgtagtgctgacagttttttattagagagcagatttctgatgaacaaccaacgaaaaaagacgggaaaaccgtctatcaatatgctgaaacgcgtgagaaaccgtgtgtcaactggatcacagttggcgaagagattctcaagaggattgctgatggtcttcacactcgaagatttcgttggggactggcgacagacagccggctacaacctggaccaagtccttgaacagggaggtgtgtccagtttgtttcagaatctcggggtgtccgtaactccgatccaaaggattgtcctgagcggtgaaaatgggctgaagatcgacatccatgtcatcatcccgtatgaaggtctgagcggcgaccaaatgggccagatcgaaaaaatttttaaggtggtgtaccctgtggatgatcatcactttaaggtgatcctgcactatggcacactggtaatcgacggggttacgccgaacatgatcgactatttcggacggccgtatgaaggcatcgccgtgttcgacggcaaaaagatcactgtaacagggaccctgtggaacggcaacaaaattatcgacgagcgcctgatcaaccccgacggctccctgctgttccgagtaaccatcaacggagtgaccggctggcggctgtgcgaacgcattctggcgggaagcggagagggcagaggaagtctgctaacatgcggtgacgtcgaggagaatcctggacctatgaataatcagaggaagaaaacaggtaagccaagcataaacatgttaaagagagtccgcaatagagtcagcacagggagccaactagcaaaacgctttagccgcgggctattaaacggccaaggaccaatgaaactggttatggcgttcatagctttcctcagatttctagccattccaccaacagcaggagtcttggctagatggggaaccttcaagaagtcgggggctattaaggtcctaaaaggcttcaagaaggagatttcaaacatgctgagcataatcaacaaaaggaaaaagacatcgctctgcctcatgatgatgttaccagcaacacttgctttccacctgacttcacgcgatggagagccgcgcatgattgtggggaagaatgaaagagggaaatccttactttttaagacagcttctggaatcaacatgtgcacactcatagctatggacttgggagagatgtgtgatgacacggtcacttataaatgccccctcattgccgaagtggaacctgaagacattgattgctggtgcaaccttacatcgacatgggtgacttatggaacgtgcaatcaagctggggagcatagacgcgacaagagatcagtggcgttggctccccatgttggcatgggactggacacacgtacccaaacctggatgtcggctgaaggagcttggagacaagttgaaaaggtagagacatgggctcttaggcacccaggtttcaccatactagctctattccttgcccattacataggcacttccctgacccagaaagtggttatttttatactactaatgctggtcactccatccatgacaatgagatgcgtgggagtaggaaacagagattttgtggaaggtctgtcaggagctacgtgggttgatgtggtgcttgagcacggtgggtgtgtgaccactatggctaagaacaagccgacgctggacatagagcttcagaagaccgaggccacccaactggcgaccctaaggaagttatgcattgagggaaaaattaccaacataacaactgattcaaggtgtcctacccagggggaagcgattctacctgaggagcaggaccagaactacgtgtgtaagcacacatacgtggatagaggttggggaaacggttgtggtttgtttggaaaaggaagcttggtgacatgcgcgaaatttcaatgtctagaaccaatagagggaaaagtggtgcaatatgagaaccttaaatacactgtcatcatcacagtgcacacaggagaccaacaccaagtgggaaatgatacgcagggagtcacggttgagataacaccccaggcatcaaccgttgaagccgtcttgcctgagtatggaacccttgggctagaatgctcaccacggacaggcttggatttcaatgaaatgattttattgacaatgaaaaacaaagcctggatggtacataggcaatggttctttgacctacccctaccatggacatcaggagctacaacagagacaccaacttggaacaggaaagagcttcttgtaacattcaaaaatgcacatgcaaaaaagcaagaagtggttgtccttggatcgcaagagggagcaatgcacacagcgctaacaggagctacagagattcaaaactcaggaggtacaagcatttttgcggggcacttgaaatgtagacttaagatggacaaattggaactcaaggggatgagctatgcaatgtgcttgaatacctttgtgttgaagaaagaagtctccgaaacgcagcatgggacaatactcattaaggtcgagtacaaaggggaagatgcaccttgcaagattcctttctccacagaggatggacaagggaaagcccacaatggtagattgatcacagccaacccagtggtgaccaagaaggaggagcctgtcaacattgaggctgaacctccttttggggaaagcaacatagtgattggaattggagacaaagccttgaaaattaactggtacaagaagggaagctcaattgggaagatgttcgaggccactgccagaggtgcaaggcgcatggccatcttgggagacacagcctgggactttggttcagtgggtggtgttctaaattcactagggaaaatggtgcaccaaatattcggaagtgcttacacagccctgtttagtggagtctcatggataatgaaaattggaataggtgtcctcttaacctggatagggttgaattcaaaaaacacttccatgtcattttcatgcattgtgataggaattatcacactctatctgggagccgtggtacaagctgacatggggtgcgccataaactggaaaggaaaagaactcaaatgtggaagtggaatttttgtcactaatgaggtccacacctggacagagcaatacaaatttcaagcagactcccctaaaagactggcgacagccatcgcaggcgcttgggaaaatggagtctgtggaatcaggtcaacaaccagaatggagaatctattgtggaagcaaatagccaatgagctgaactacatattatgggaaaacaacatcaaattaacggtagttgtgggtgacataattggggtcttagagcaagggaaaagaacattaacaccacagcccatggagctaaaatattcatggaaaacatggggaaaggcaaaaatagtgacagctgaaacacaaaattcctctttcataatagatgggccaaacacaccggagtgtccaagtgcctcaagagcatggaatgtgtgggaggtggaagattacgggtttggagtcttcacaaccaacatatggctgaaactccgagaggtgtacacccaatcatgcgaccataggctaatgtcggcagccatcaaagatgagagggccgtgcatgccgacatgggctattggatagaaagccaaaagaatggaagttggaagctagaaaaagcatccttcatagaggtgaaaacctgtacttggccaaaatcacacactctttggagcaatggtgtactagagagtgacatgatcatcccaaagagtctagctggtcccatttcacaacacaaccacaggcctgggtaccacacccaaacggcaggaccttggcacttgggaaaattggagctggactttaactattgtgaaggaacaacagtagtcatcacagaaaactgtgggacaagaggcccatcattgagaacaacaacagtgtcagggaagctgatacacgaatggtgttgccgctcgtgcacacttcctcccttacgatacatgggagaggacggctgctggtatggcatggaaattagacctatcaatgagaaagaagagaacatggtaaagtctttagtctcagcagggagtggaaaggtggacaacttcacaatgggagtcctgtgtttggcaatcctcttcgaagaggtgatgagaggaaaatttgggaaaaaacacatgattgcaggggttctcttcacgtttgtgctccttctctcagggcaaataacatggagagatatggcacacacactcataatgattgggtccaacgcttctgacaggatgggaatgggcgttacctacttggctttaattgcaacattcaaaatccagccattcttggctttgggattcttcctgaggaaattgacatctagagaaaatttgctgttgggagttgggttggccatggcaacaacgttacaactgccagaggacattgaacaaatggcgaatggaattgctctggggctcatgactctaaaactgataacacaatttgagacatatcagttgtggacagcattagtctccttaacgtgttcaaatacaattttcacgctgactgttgcctggagaacagccaccttgattctggccggagtttcgcttttgccactgtgccagtcttcgagcatgaggaaaacagattggctcccaatgactgtggcagctatgggagttccacccttaccactttttatcttcagcttgaaggacacaccaaaaaggaggagctggccactgaatgagggagtgatggctgttgggcttgtgagcattctagccagttctctccttaggaatgatgtgcccatggctggaccactagtggccgggggcttgttgatagcgtgctatgtcataactggcacgtcagcagacctcactgtagaaaaggcagcagatgtaacatgggaggaagaagctgagcaaacaggagtgtcccacaatttgatgatcacagttgatgatgatggaacaatgagaataaaggatgatgagactgagaacattctaacagtgctcttaaaaacagcattactaatagtatcaggcatctttccatactccatacccgccacactgttggtctggcatacttggcaaaagcaaacccaaagatctggcgttctatgggacgtacccagccccccagaaacacagaaagcagaactggaagagggggtttataggatcaaacaacaaggaatttttgggaaaacccaagtgggggttggagtgcagaaagaaggagtcttccacaccatgtggcacgtcacaagaggggcagtattgacgcacaatgggaaaagactggaaccaaactgggccagcgtgaaaaaagatctgatttcatacggaggaggatggagattgagcgcacaatggcaaaagggagaggaggtgcaggttattgccgtagagcctgggaagaacccaaaaaacttccaaaccatgccgggcatttttcagacaacaacgggggaaataggagcaattgcactagacttcaagcctggaacttcaggatctcctatcataaacagagagggaaaggtagtgggactgtatggcaatggagtggttacgaaaaatggtggctacgtcagtggaatagcgcaaacaaatgcagaaccagacggaccgacaccggaattggaagaagaaatgttcaaaaagcgaaatctaaccataatggatcttcatcctgggtcaggaaagacgcggaaatatcttccagccatcgtcagagaagcaatcaagagacgtttaagaactctaattttggcaccaacaagagtggttgcagctgagatggaagaagcactgaaaggactcccaataaggtatcaaacaactgcaacaaaatctgaacacacaggaagggagattgttgatctaatgtgccacgcaacattcacaatgcgcttgctatcaccagtcagggttccaaattacaatctgataataatggatgaggcccatttcacagatccagccagtatagcggctagagggtacatatcaactcgtgtaggaatgggagaggcagctgcaattttcatgacagcaacaccccctggaactgctgaagcctttccccagagcaacgctccaattcaagatgaagaaagggatattccggaacgctcatggaattcaggcaatgaatggattaccgactttgttggaaagacggtgtggtttgtacctagcatcaaagctggaaatgacatagcaaactgcctgcggaaaaatgggaaaaaggtcatccaacttagtagaaagacttttgatacagaatatcaaaagaccagactgaatgattgggacttcgtggtgacaacagacatttcagaaatgggagccaactttaaagcagatagagtgattgacccaagaagatgtctcaagccagtaattttgacagatggacccgagcgagtgatcctggctggaccaatgccagtcaccgcagcgagcgctgcgcaaaggagagggagagttggcaggaacccacaaaaggaaaatgaccagtacatattcacgggccagcctctcaacaatgacgaagaccatgctcactggacagaagcaaaaatgctgctagacaacatcaacacaccagaagggatcataccagctctctttgaaccagagagggagaagtcagccgctatagacggtgaataccgcctgaagggtgagtccaggaagaccttcgtggaactcatgaggaggggagacctcccagtttggctagcccataaagtagcctcagaagggatcaaatacacagatagaaaatggtgctttgatggagaacgtaataatcaaattttagaggagaacatggatgtggaaatctggacaaaggaaggagaaaggaaaaaattgagacctaggtggcttgatgcccgcacttattcagatcccttagcactcaaggaattcaaggattttgcagctggcagaaagtcaatcgcccttgatcttgtgacagaaataggaagagtgccttcacacttagcctacagaacgagaaacgccctggacaacttggtgatgctgcacacgtcagaacatggcggtagggcctacaggcatgcagtggaggaactaccagaaacaatggaaacactcctactcttgggactcatgatcttattaacaggtggagcaatgcttttcctgatatcaggtaaagggattggaaagacttcaataggactcatttgtgttattgtttccagtggcatgttatggatggctgatgtcccacttcaatggatcgcgtcggctatagtcctggaatttttcatgatggtgttgctcataccagaaccagaaaaacaaagaactccccaagacaaccaactcgcatatgtcgtgataggcatactaacactggctgcgatagtagcagctaatgaaatgggattattggaaactacaaagagagacttaggaatgtctaaagaaccaggtgttgtttctccaaccagctatttagatgtagacttgcacccagcatcagcctggacattgtacgccgtggccacaacagtaataacaccaatgttgagacataccatagagaattccacagcaaatgtatccctggcagccatagccaaccaggcagtggtcctgatgggtttagacaaaggatggccaatatcgaaaatggacctaggcgtaccgctactggcactgggctgctattcacaagtgaacccactgactctcacagcggcagtacttctgctagttacacattatgccattataggtccaggattgcaggctaaagccactcgtgaagctcaaaaaagaacagctgctggaataatgaagaatccaacggtggatgggataatgacaatagacctagatcctgtaatatacgattcaaaattcgaaaagcaactaggacaggtcatgctcctggttctgtgtgcagttcaactcttgttaatgagaacatcatgggcattgtgtgaagctctaaccctagccacaggaccaataacaacactctgggaaggatcacctggaaagttttggaacaccacgatagctgtttccatggctaacatttttagagggagctacttagcaggagctgggcttgctttttctatcatgaaatcagttggaacaggaaggagaggaacggggtcacaaggcgaaaccttaggagaaaagtggaaaaagaaattaaatcagttatcccggaaagagtttgacctttacaagaaatctggaatcactgaagtggatagaacagaagccaaagaagggttgaaaagaggagaaacaacacatcatgccgtgtccagaggcagcgcaaaacttcaatggttcgtggagaggaacatggtcattcccgaaggaagagtcatagacttaggctgtggaagaggaggctggtcatattactgcgcaggactgaaaaaagttacagaagtgcgaggatacacaaaaggtggcccaggacacgaagaaccagtacctatgtccacatacggatggaacctagtcaagctaatgagtggaaaggacgtgttttatcttccacctgagaagtgtgacaccctattgtgtgacattggagaatcttcaccaagtccaacagtggaagaaagcagaactataagagtcttgaagatggttgagccatggctaaaaaacaaccagttttgcattaaagtattaaacccttacatgccaactgtgattgagcacctagaaagattacaaagaaaatatggaggaatgcttgtgagaaacccactctcacgaaactccacgcatgaaatgtactggatatccaatggtaccggcaacatcgtctcttcagtcaacatggtatccagattgctactgaacagatttacgatgacacacaggagacccaccatagagaaagatgtggatttgggagcaggaactcgacatgtcaatgcggaaccagaaacacccaacatggacgtcattggagaaagaataaaaaggatcaaggaggagcatagttcaacatggcactatgatgatgaaaatccttacaaaacgtgggcttaccatggatcctatgaagtcaaagccacaggctcagcctcctccatgataaatggagtcgtgaaactcctcacaaaaccatgggatgtggttcccatggtgacacagatggcaatgacagatacaactccatttgggcagcaaagagttttcaaagagaaagtggacaccaggacacccaggcccatgccagggacaagaaaggttatggagattacagcggaatggctttggagaaccctgggaaggaacaaaaaacccagattgtgcacaagggaagagttcacaaaaaaggtcagaaccaacgcggctatgggagctgttttcacagaggagaaccaatgggatagcgcgagagctgctgttgaggacgaggaattctggaaacttgtggacagagaacgtgaactccacaaattgggcaagtgtggaagctgtgtctacaatatgatgggcaagagagagaagaaacttggagagtttggcaaagcaaaaggcagtagagccatatggtacatgtggttgggagccaggtaccttgagttcgaagcactcggatttttaaatgaagaccactggttctcgcgtgaaaactcttacagtggagtagaaggagaaggactgcacaagctgggatacattttaagagacatttctaagatacccggaggagccatgtatgccgatgacacagctggttgggacacaagaataacagaagatgacctgcacaatgaggaaaaaatcacacagcaaatggaccctgaacacagacaattagcgaacgccatatttaagctcacataccaaaacaaagtggtcaaagttcaacgaccaactccaaaaggcacggtaatggacatcatatctagaaaagaccaaagaggcagtggacaggtggggacttatggtctgaacacattcaccaacatggaagcccagttggtcagacagatggaaggagaaggtgtgttgtcgaaggcagacctcgagaaccctcatctgctagagaagaaaatcacacaatggttggaaaccaaaggagtggagaggttaaaaagaatggccatcagcggagatgattgcgtggtgaaaccgattgatgacaggtttgccaatgccctgcttgccctgaacgacatgggaaaggttaggaaggacatacctcaatggcagccatcaaaggggtggcatgattggcaacaggtccctttctgctcccaccactttcatgaactgatcatgaaagatggaagaaagttggtggttccctgcagaccccaggacgaactaataggaagggcgagaatttctcaaggagcaggatggagccttaaagaaactgcatgtctagggaaagcctacgctcaaatgtggagtctcatgtattttcacagaagagatcttagactagcatccaacgccatttgttcagcagtaccagtccattggatccctacaagcagaacgacatggtctattcacgctcaccatcagtggatgaccacagaagacatgctaactgtctggaacagggtgtggatagaggacaatccatggatggaagacaaaactccagtcacaacttgggaagatgttccatacctagggaagagagaagatcaatggtgcggatcactcattggtctcacttccagagcaacctgggcccagaacatactcacggcaatccaacaggtgagaagccttataggcgatgaagaatttctggactacatgccttcgatgaagagattcaggaaggaggaggagtcagagggagccatttggtaaacaaaggaaggtaaactgtcaggccaccttaagccacagtacggaacaagctgtgcagcctgtgagccccgtccaaggacgttaaaagaagaagtcaggcccaaaagccacggtttgagcaagccgtgctgcctgtagctccgtcgtggggacgtaaagcctgggaggctgcaaaccgtggaagctgtacgcacggtgtagcagactagcggttagaggagacccctcccatgacacgacgcagcagcggggcccgagcactgagggaagctgtacctccttgcaaaggactagaggttagaggagaccccccgcaaataaaaacagcatattgacgctgggagagaccagagatcctgctgtctcctcagcatcattccaggcacagaacgccagaaaagggaatggtgctgttgaatcaacaggttct

SEQ ID NO: 22 - protein, 3620 aa, Artificial Sequence
  Synthetic Construct
MNNQRKKTGKPSINMLKRVRNRVSTGSQLAKRFSRGLLMVFTLEDFVGDWRQTAGYNLDQVLEQGGVSSLFQNLGVSVTPIQRIVLSGENGLKIDIHVIIPYEGLSGDQMGQIEKIFKVVYPVDDHHFKVILHYGTLVIDGVTPNMIDYFGRPYEGIAVFDGKKITVTGTLWNGNKIIDERLINPDGSLLFRVTINGVTGWRLCERILAGSGEGRGSLLTCGDVEENPGPMNNQRKKTGKPSINMLKRVRNRVSTGSQLAKRFSRGLLNGQGPMKLVMAFIAFLRFLAIPPTAGVLARWGTFKKSGAIKVLKGFKKEISNMLSIINKRKKTSLCLMMMLPATLAFHLTSRDGEPRMIVGKNERGKSLLFKTASGINMCTLIAMDLGEMCDDTVTYKCPLIAEVEPEDIDCWCNLTSTWVTYGTCNQAGEHRRDKRSVALAPHVGMGLDTRTQTWMSAEGAWRQVEKVETWALRHPGFTILALFLAHYIGTSLTQKVVIFILLMLVTPSMTMRCVGVGNRDFVEGLSGATWVDVVLEHGGCVTTMAKNKPTLDIELQKTEATQLATLRKLCIEGKITNITTDSRCPTQGEAILPEEQDQNYVCKHTYVDRGWGNGCGLFGKGSLVTCAKFQCLEPIEGKVVQYENLKYTVIITVHTGDQHQVGNDTQGVTVEITPQASTVEAVLPEYGTLGLECSPRTGLDFNEMILLTMKNKAWMVHRQWFFDLPLPWTSGATTETPTWNRKELLVTFKNAHAKKQEVVVLGSQEGAMHTALTGATEIQNSGGTSIFAGHLKCRLKMDKLELKGMSYAMCLNTFVLKKEVSETQHGTILIKVEYKGEDAPCKIPFSTEDGQGKAHNGRLITANPVVTKKEEPVNIEAEPPFGESNIVIGIGDKALKINWYKKGSSIGKMFEATARGARRMAILGDTAWDFGSVGGVLNSLGKMVHQIFGSAYTALFSGVSWIMKIGIGVLLTWIGLNSKNTSMSFSCIVIGIITLYLGAVVQADMGCAINWKGKELKCGSGIFVTNEVHTWTEQYKFQADSPKRLATAIAGAWENGVCGIRSTTRMENLLWKQIANELNYILWENNIKLTVVVGDIIGVLEQGKRTLTPQPMELKYSWKTWGKAKIVTAETQNSSFIIDGPNTPECPSASRAWNVWEVEDYGFGVFTTNIWLKLREVYTQSCDHRLMSAAIKDERAVHADMGYWIESQKNGSWKLEKASFIEVKTCTWPKSHTLWSNGVLESDMIIPKSLAGPISQHNHRPGYHTQTAGPWHLGKLELDFNYCEGTTVVITENCGTRGPSLRTTTVSGKLIHEWCCRSCTLPPLRYMGEDGCWYGMEIRPINEKEENMVKSLVSAGSGKVDNFTMGVLCLAILFEEVMRGKFGKKHMIAGVLFTFVLLLSGQITWRDMAHTLIMIGSNASDRMGMGVTYLALIATFKIQPFLALGFFLRKLTSRENLLLGVGLAMATTLQLPEDIEQMANGIALGLMTLKLITQFETYQLWTALVSLTCSNTIFTLTVAWRTATLILAGVSLLPLCQSSSMRKTDWLPMTVAAMGVPPLPLFIFSLKDTPKRRSWPLNEGVMAVGLVSILASSLLRNDVPMAGPLVAGGLLIACYVITGTSADLTVEKAADVTWEEEAEQTGVSHNLMITVDDDGTMRIKDDETENILTVLLKTALLIVSGIFPYSIPATLLVWHTWQKQTQRSGVLWDVPSPPETQKAELEEGVYRIKQQGIFGKTQVGVGVQKEGVFHTMWHVTRGAVLTHNGKRLEPNWASVKKDLISYGGGWRLSAQWQKGEEVQVIAVEPGKNPKNFQTMPGIFQTTTGEIGAIALDFKPGTSGSPIINREGKVVGLYGNGVVTKNGGYVSGIAQTNAEPDGPTPELEEEMFKKRNLTIMDLHPGSGKTRKYLPAIVREAIKRRLRTLILAPTRVVAAEMEEALKGLPIRYQTTATKSEHTGREIVDLMCHATFTMRLLSPVRVPNYNLIIMDEAHFTDPASIAARGYISTRVGMGEAAAIFMTATPPGTAEAFPQSNAPIQDEERDIPERSWNSGNEWITDFVGKTVWFVPSIKAGNDIANCLRKNGKKVIQLSRKTFDTEYQKTRLNDWDFVVTTDISEMGANFKADRVIDPRRCLKPVILTDGPERVILAGPMPVTAASAAQRRGRVGRNPQKENDQYIFTGQPLNNDEDHAHWTEAKMLLDNINTPEGIIPALFEPEREKSAAIDGEYRLKGESRKTFVELMRRGDLPVWLAHKVASEGIKYTDRKWCFDGERNNQILEENMDVEIWTKEGERKKLRPRWLDARTYSDPLALKEFKDFAAGRKSIALDLVTEIGRVPSHLAYRTRNALDNLVMLHTSEHGGRAYRHAVEELPETMETLLLLGLMILLTGGAMLFLISGKGIGKTSIGLICVIVSSGMLWMADVPLQWIASAIVLEFFMMVLLIPEPEKQRTPQDNQLAYVVIGILTLAAIVAANEMGLLETTKRDLGMSKEPGVVSPTSYLDVDLHPASAWTLYAVATTVITPMLRHTIENSTANVSLAAIANQAVVLMGLDKGWPISKMDLGVPLLALGCYSQVNPLTLTAAVLLLVTHYAIIGPGLQAKATREAQKRTAAGIMKNPTVDGIMTIDLDPVIYDSKFEKQLGQVMLLVLCAVQLLLMRTSWALCEALTLATGPITTLWEGSPGKFWNTTIAVSMANIFRGSYLAGAGLAFSIMKSVGTGRRGTGSQGETLGEKWKKKLNQLSRKEFDLYKKSGITEVDRTEAKEGLKRGETTHHAVSRGSAKLQWFVERNMVIPEGRVIDLGCGRGGWSYYCAGLKKVTEVRGYTKGGPGHEEPVPMSTYGWNLVKLMSGKDVFYLPPEKCDTLLCDIGESSPSPTVEESRTIRVLKMVEPWLKNNQFCIKVLNPYMPTVIEHLERLQRKYGGMLVRNPLSRNSTHEMYWISNGTGNIVSSVNMVSRLLLNRFTMTHRRPTIEKDVDLGAGTRHVNAEPETPNMDVIGERIKRIKEEHSSTWHYDDENPYKTWAYHGSYEVKATGSASSMINGVVKLLTKPWDVVPMVTQMAMTDTTPFGQQRVFKEKVDTRTPRPMPGTRKVMEITAEWLWRTLGRNKKPRLCTREEFTKKVRTNAAMGAVFTEENQWDSARAAVEDEEFWKLVDRERELHKLGKCGSCVYNMMGKREKKLGEFGKAKGSRAIWYMWLGARYLEFEALGFLNEDHWFSRENSYSGVEGEGLHKLGYILRDISKIPGGAMYADDTAGWDTRITEDDLHNEEKITQQMDPEHRQLANAIFKLTYQNKVVKVQRPTPKGTVMDIISRKDQRGSGQVGTYGLNTFTNMEAQLVRQMEGEGVLSKADLENPHLLEKKITQWLETKGVERLKRMAISGDDCVVKPIDDRFANALLALNDMGKVRKDIPQWQPSKGWHDWQQVPFCSHHFHELIMKDGRKLVVPCRPQDELIGRARISQGAGWSLKETACLGKAYAQMWSLMYFHRRDLRLASNAICSAVPVHWIPTSRTTWSIHAHHQWMTTEDMLTVWNRVWIEDNPWMEDKTPVTTWEDVPYLGKREDQWCGSLIGLTSRATWAQNILTAIQQVRSLIGDEEFLDYMPSMKRFRKEEESEGAIW

SEQ ID NO: 23 - DNA, 11342 bp, Artificial Sequence
  recombinant flavivirus
  CDS (103)..(10953)
agttgttagtctgtgtggaccgacaaggacagttccaaatcggaagcttgcttaacacagttctaacagtttgttttaaatagagagcagatctctggaaaaatgaaccaacgaaaaaaggtggttagaccacctttcaatatgctgaaacgcgagagaaaccgcgtatcaacccctcaagggttggtgaagagattctcaaccggacttttctccatggtcttcacactcgaagatttcgttggggactggcgacagacagccggctacaacctggaccaagtccttgaacagggaggtgtgtccagtttgtttcagaatctcggggtgtccgtaactccgatccaaaggattgtcctgagcggtgaaaatgggctgaagatcgacatccatgtcatcatcccgtatgaaggtctgagcggcgaccaaatgggccagatcgaaaaaatttttaaggtggtgtaccctgtggatgatcatcactttaaggtgatcctgcactatggcacactggtaatcgacggggttacgccgaacatgatcgactatttcggacggccgtatgaaggcatcgccgtgttcgacggcaaaaagatcactgtaacagggaccctgtggaacggcaacaaaattatcgacgagcgcctgatcaaccccgacggctccctgctgttccgagtaaccatcaacggagtgaccggctggcggctgtgcgaacgcattctggcgggaagcggagagggcagaggaagtctgctaacatgcggtgacgtcgaggagaatcctggacctatgaatcagaggaagaaagtcgtgcgccctccatttaacatgttaaagagagaacgcaatagagtgagcacaccacagggactcgtcaaacgctttagcacagggttgtttagtgggaaaggacccttacggatggtgctagcattcatcacgtttttgcgagtcctttccatcccgccaacagcagggattctgaaaagatggggacagttgaaaaagaataaggccatcaagatactgattggattcaggaaggagataggtcgcatgttaaacatcttgaataggagaagaaggtcaacaatgacattgctgtgtttgattcccaccgtaatggcgtttcacctgtcaacaagagacggcgaacccctcatgatagtggcaaaacacgaaagggggagacctctcttgtttaagacaacagaaggaatcaacaaatgcaccctcattgccatggacctgggtgaaatgtgtgaagacactgtcacatataaatgtcctctactggttaacaccgaacctgaagacattgattgctggtgcaatctcacgtccacctgggtcatgtacgggacatgcacccagagcggagaacggaggcgagagaagcgctcagtagctttaacaccacattcaggaatgggattggaaacaagagctgagacatggatgtcatcggaaggggcttggaaacatgctcagagagtggaaagctggatactcagaaacccaggattcgcgctcctggcaggatttatggcttacatgattgggcaaacaggaatccagcgaactgttttctttgtcctaatgatgctagtcgccccatcctacggaatgcgatgcgtaggggtagggaacagagactttgtggaaggagtctcgggtggagcatgggtcgacttggtgctagaacatggaggatgcgtcacaactatggcccagggaaaaccaaccttggattttgaactgaccaagacaacagctaaggaagtggctctgttgagaacctattgcattgaagcttcgatatcaaacataaccacggcaacaagatgtccaacgcaaggagagccttatctcaaagaagaacaagaccaacaatacatttgccggagagacgtggtagacagagggtggggtaatggctgtggcctgtttggaaaaggaggagttgtgacatgtgcgaagttttcatgctcggggaagataacaggcaatctggtccaaattgaaaaccttgaatatacagtagttgtgacagtccacaatggagacacccatgcagtaggaaatgacacatccaatcatggagtgacagccacgataactcccaggtcaccatcggtagaagttaaattgccggactatggagaactaacactcgattgtgaacctaggtccggaattgatttcaatgagatgatcctgatgaaaatgaaaaagaaaacgtggcttgtgcacaagcaatggtttttggacctacctctaccatggacagcaggagcagacacatcagaagttcattggaattataaagagagaatggtgacattcaaggttcctcatgccaagagacaggatgtgacagtgctaggatctcaggagggagctatgcattctgccctcgccggagccacagaagtggattctggtgatggaaatcacatgtttgcaggacatctcaagtgcaaagtccgtatggagaaattgagaattaagggaatgtcatatacgatgtgttcaggaaagttctcaattgacaaagagatggcagaaacacagcatgggacagcagtggtgaaagtcaagtatgaaggcgctggagctccgtgtaaaatccccatagagataagagacgtgaacaaggaaaaagtagttgggcgcatcatctcatctaccccttttgctgagaataccaacagcgtaaccaacatagaattagaacccccttttggggacagctacatagtgataggtgttggaaatagtgcattaacactccattggttcagaaaagggagctccattggcaagatgtttgagtccacatacagaggtgcaaaacgaatggccattctaggtgaaacagcttgggattttggttctgttggtggactgttcacatcactgggaaaggctgtacaccaggtttttggaagtgtgtatacaaccatgtttggaggggtctcatggataattagaatcctaattgggctcttagtattgtggattggcacgaattcaagaaacacttcaatggcaatgacgtgcatagctgttggaggaatcactctgtttctaggtttcacagttcaagcagacatgggttgtgtggtgtcatggaatgggaaggaactaaaatgtggaagcggaatttttgtggttgacaacgtgcacacttggacagaacagtacaaattccaaccagagtccccagcgaggctagcgtctgcaatattgaatgcccacaaagatggggtctgtggaatcagatcaaccacgaggctggaaaatgttatgtggaagcaaataaccaacgagctaaactatgttctctgggaaggaggacatgacctcactgtagtggctggggacgtgaagggggtgttgaccaaaggcaagagagcactcacacctccagtgaatgatctgaaatattcatggaagacatggggaaaagcaaaaatctttaccccagaagcaagaaatagcacatttttaatagacggaccagacacctccgaatgccccaatgaacgaagagcatggaacttttttgaggtagaagactatggatttggcatgttcacgaccaacatatggatgaaattccgagaaggaagttcagaagtgtgtgaccatagattaatgtcggcggcaatcaaagatcagaaagctgtgcatgctgacatgggttattggatagagagctcaaaaaaccagacctggcagatagagaaagcatcccttattgaagtgaaaacatgtctgtggcccaaaacccacacgctgtggagcaatggagtgctggaaagtcagatgctcattccaagatcatatgcaggccctttttcacagcataattaccgccagggctatgccacgcaaaccgtgggcccatggcacttaggcaaattggagatagactttggagaatgccccggaacaacagtcacaatccaggaggattgtgaccatagaggcccatctttgaggaccaccactgcatctggaaaactggtcacgcaatggtgctgccgctcctgcacgatgcctcccttaaggttcttgggagaagatggatgttggtatgggatggagatcaggcccttgagtgaaaaagaagagaacatggttaaatcacaggtaacggccggacagggtacatcagaaactttttctatggggctgctatgcctgaccttgttcgtggaagaatgcttgagaagaagagtcactaggaaacacatgatattggttgtggtaatcaccttctgtgctatcatcctgggaggtctcacatggatggacttactacgagcccttatcatgttgggggacactatgtctggtagaataggaggacagattcacctagccatcatggcagtgttcaagatgtcaccaggatatgtgctgggtgtgtttttaaggaaacttacttcaagagagacagcactaatggtaataggaatggccatgacaacggtgttttcaattccacatgacctcatggaactcattgatggaatatcgctggggttgatattgttaaaaatagtaacacattttgataacacccaagtgggaaccttagccctttccctgactttcataagatcaacaacaccattagtcatggcttggaggaccattatggctgtgttctttgtggtcacactcattcctttgtgtaggacaagctgtcttcaaaaacagtcccattgggtagaaataacagcacttatcttaggagcccaggctttgccagtgtacctaatgaccctcatgaaaggagcctcaagaagatcttggcctcttaatgagggcataatggctgtgggtttggtgagcctcttaggaagcgccctcctaaagaatgatgttcctttagctggcccaatggtggcaggaggcttacttctagcggcttacgtaatgagtggtagctcggcagacttgtcactagagaaggctgccaatgtgcagtgggatgaaatggcggacataactggctcaagcccaatcatagaagtaaagcaggatgaagatggctctttctccatacgggacgtcgaggaaaccaacatgataaccctcttggtgaaactggcactgataacagtatcaggtctttaccccttggcaattccagtcacaatggcattatggtatatttggcaagtgaaaacacaaagatcaggagctctgtgggacgtcccctcacccgctgccactcagaaagccacactgtctgaaggagtgtataggatcatgcaaagagggttgtttgggaaaactcaggttggagtagggatacacatggaaggtgtattccacacaatgtggcacgtgacaagaggatcagtgatctgccatgagacagggagattagagccatcttgggctgacgtcaggaatgacatgatatcatacggtgggggatggaggctcggagacaaatgggacaaagaagaagatgttcaggtcctagccatagaaccaggaaaaaatcctaaacatgtccaaacgaaaccaggccttttcaagaccctaactggagaaattggagcagtaactctggatttcaaacccggaacgtctggctctcctatcattaacaagaaagggaaagttattggactctatggaaatggagtagttaccaaatcaggtgattacgtcagtgccataacgcaagctgaaagaattggtgagccagattatgaagtggatgaggacatttttcgaaagaaaagattaaccataatggacttacaccccggagctggaaagacaaaaagaattctcccatcaatagtcagagaagctttaaaaaggaggctgcgaactttgattttggctcctacgagagtggtggcagccgagatggaagaggccctacgcggactgccaatccgttatcagaccccagctgtgaaatcagatcacacaggaagagagattgtggacctcatgtgtcatgcaaccttcacaacgagacttttgtcatcaaccagggtaccaaattataacctcatagtgatggatgaagcacatttcactgacccttgtagtgtcgcggctagaggatacatttcaaccagggtggaaatgggagaggcagcagccatcttcatgactgcaacccctcctggatcgatagatcccttcccccagagcaacagcccgatagaagacatcgaaagggaaatcccagaaaggtcatggaacacagggttcgactggataacagactaccaagggaaaactgtgtggtttgttcccagcataaaagctggaaatgacattgcaaattgtttgcgaaagtcgggaaagagagtgatccagttgagcaggaaaacctttgacacagagtatccaaaaacgaaactcacggactgggattttgtggtaaccacagacatatctgaaatgggggccaatttcagagctgggagagtgatagaccccaggagatgcctcaagccagttatcctaacagatgggccagagagagttattctagcaggtccaatcccagtaactccagcaagtgccgctcagagaagagggcgaataggtaggaatccagcacaagaagatgaccaatacgttttctccggagacccactaaagaatgatgaagatcatgcccactggacagaagcgaagatgttgcttgacaatatctacacccctgaagggataattccaacattgtttggtccggaaagggaaaaaacccaagccattgatggagagtttcgcctcagaggggaacaaaggaagacttttgtggaattaatgaggagaggagaccttccggtgtggctgagctacaaggtagcttctgccggtatctcttacaaagaccgagaatggtgcttcacaggggaaaggaacaaccaaattttagaagaaaacatggaggttgaaatctggactagagagggagaaaagaaaaaactaaggccaaaatggttagatgcacgtgtgtacgctgaccccatggctttgaaggatttcaaggagtttgccagtggaagaaagagcataactcttgacatcctaacagagattgccaccttgccaacttacctctcctctaaggccaagctagcccttgacaacatagtcatgctccacacaacagaaaaaggagggagggcctaccaacacgccttgaacgaactcccggaatcactggaaacactcatgcttgtagccctactaggtgctatgacagccggtatcttcctgtttttcatgcaggggaaaggaatagggaaattgtcaatgggtctgatagccatagctgtggctagtggtttgctttgggtagcagaaattcagccccagtggatagcagcttcaatcatactggagttttttcttatggtgctgttgataccagaaccagaaaaacaaaggaccccacaagacaatcaattgatctacgtcatattgaccattctcaccattattggtcttatagcagccaatgagatggggctgattgaaaaaacaaaaacggactttgggttttaccaggtaaaaacagaaaccaccattcttgatgtggatttgagaccagcctcagcatggacactctatgcagtggccaccactattctgactcccatgctgagacacaccatagagaacacgtctgccaacctatctctagcagccattgccaaccaagcagctgtcttaatgggacttggaaaaggatggccgctccacagaatggacctcggtgtgccgctgttagcaatgggatgttattctcaagtaaacccaacaaccctgacagcatccttagtcatgcttttagtccattatgccataataggtccaggattgcaggcaaaagccacaagagaggcccagaaaaggacagctgctgggatcatgaagaaccccacggtggacgggataacagtaatagatctagaaccaatatcttatgacccaaaatttgaaaaacagttagggcaagtcatgctactggtcctgtgtgttggacaattacttttgatgagaacaacatgggctctctgcgaagtattgactttggccacaggaccaatcatgaccttgtgggagggcaacccgggaaggttttggaacacgaccatagctgtttccacagccaacatttttaggggaagctacttggcgggagctggactagctttttcactcataaagaatgtccaaacccctaggaggggaactgggaccacaggagagacactgggagagaagtggaagagacagctgaactcattagatagaaaagagtttgaagagtacaaaagaagtggaatactagaagtggataggactgaagccaagtctgccctaagagatggatctaaaatcaaacatgcggtgtccagagggtctagtaagatcagatggattgttgaaagagggatgataaagccaaaaggaaaggtcgtggatcttggttgtgggaggggaggatggtcctattacatggcgacactcaagaacgtgactgaagtgaaaggatatacaaaaggaggtccaggacatgaagaaccaatccccatggctacttatggctggaatttggtcaaactccattcaggggttgatgtgttctacaaacccactgagcaggtggacaccctgctttgtgacattggggagtcatcctctaatccgacaatagaggaaggaagaacattgagagtcttgaagatggtggagccatggctctcttcaaaacctgagttctgcatcaaagtcctcaacccctacatgccaacagttatagaagagctggagaagctgcagagaagacatggtggaagcctcgtcagatgcccgctatccaggaattctactcatgagatgtattgggtgtcaggtgcgtcgggaaacatcgtgagttctgtgaacacaatatcaaagatgctgttgaacaggttcacaacaaggcataggaaacccacttatgagaaggacgtagatcttggggcaggaacgagaagtgtctccactgaaacagaaaaaccagacatgacaattattgggagaaggcttcagagactgcgagaagagcacaaagaaacttggcactatgaccaggaaaacccatacagaacctgggcgtatcatggaagctatgaagctccttcgacaggctcagcatcctccatggtgaacggggtagtaaaactgctgacaaaaccttgggatgtgattccaatggtgacccagttggccatgacagacacaaccccttttgggcaacaaagagtgttcaaggagaaggtggataccagaacaccacaaccaaaacccggcacacgaatgattatgaccacgacagccaattggctgtgggccctcctcgggaagaagaaaaatcccagactgtgcacaagggaagagttcatctcaaaagttagatcaaatgcagccataggcgcagtctttcaggaagaacagggatggacatcagccagtgaagctgtgaatgacagccggttctgggaactggttgacaaagaaagggctctgcaccaggaaggaaaatgtgaatcgtgtgtctataacatgatgggaaaacgtgagaaaaaattaggagagtttggtagggccaagggaagccgagcaatctggtacatgtggctgggggcgcggttcctggaatttgaagccctgggttttttgaatgaagatcactggtttagcagagaaaactcatggagtggagtggaaggggaaggtctgcatagattgggatacatcttggaggacatagacaagaaggatggagatctaatatatgctgacgacacagcaggctgggacacgagaatcactgaggatgaccttttaaatgaagaactgatcacagaacagatggcccctcaccacaagaccctagccaaggccattttcaaactaacctatcaaaacaaagtggtgaaagtcctcagacccacaccgaaaggagcggtaatggacattatatccaggaaagaccaaagaggtagtggacaggtgggaacatatggtttaaacacattcactaacatggaagttcaactcatccgccaaatggaagctgaaggagtcatcacacaagacgacatgcagaacccaaaagggttgaaagaaagagttgagaaatggctgaaagagtgtggcgtcgacaggttgaagaggatggcaatcagtggagatgattgcgtggtgaagcccctagatgagaggtttagcacctccctcctcttcttgaatgacatgggaaaggtgaggaaagacatcccgcagtgggaaccatccaagggatggaaaaactggcaagaggttcctttttgctcccaccattttcacaagatcttcatgaaagatggccgctcactagtcgttccatgcagaaaccaggatgaactgataggaagagccagaatctcgcagggggctggatggagcttaagggaaacagcctgtctgggcaaagcttacgcccagatgtggtcgcttatgtacttccatagaagggacctgcgtttagcctccatggccatatgctcagcagttccaacggaatggtttccaacaagcagaacaacatggtcgatccacgctcatcaccagtggatgaccactgaagacatgcttaaagtgtggaacagagtgtggatagaagacaaccccaatatgactgacaagactccagtccattcgtgggaagacataccttacctagggaaaagagaggatttgtggtgtggatccctgattggactttcttccagagccacctgggcgaagaacattcacacggccataacccaggtcaggaatctgatcggaaaagaggaatacgtggattacatgccagtcatgaaaagatacagcgctccctccgagagtgaaggagttctgtaattatcaacaacaaacaccaaagagaccattgaagtcaggccacttgtgccacggcttgagcaaaccgtgctgcctgtagctccgccaataatgggaggcgtaaaattcccagggaggccatgcgccacggaagctgtacgcgtggcatattggactagcggttagaggagacccctcccatcactgacaaaacgcagcaaaaagggggcccgaagccaggaggaagctgtacttctggtggaaggactagaggttagaggagacccccccaacacaaaaacagcatattgacgctgggaaagaccagagatcctgctgtctctgcaacatcaatccaggcacagagcgccgcgagatggattggtgttgttgatccaacaggttct

SEQ ID NO: 24 - protein, 3617 aa, Artificial Sequence
  Synthetic Construct
MNQRKKVVRPPFNMLKRERNRVSTPQGLVKRFSTGLFSMVFTLEDFVGDWRQTAGYNLDQVLEQGGVSSLFQNLGVSVTPIQRIVLSGENGLKIDIHVIIPYEGLSGDQMGQIEKIFKVVYPVDDHHFKVILHYGTLVIDGVTPNMIDYFGRPYEGIAVFDGKKITVTGTLWNGNKIIDERLINPDGSLLFRVTINGVTGWRLCERILAGSGEGRGSLLTCGDVEENPGPMNQRKKVVRPPFNMLKRERNRVSTPQGLVKRFSTGLFSGKGPLRMVLAFITFLRVLSIPPTAGILKRWGQLKKNKAIKILIGFRKEIGRMLNILNRRRRSTMTLLCLIPTVMAFHLSTRDGEPLMIVAKHERGRPLLFKTTEGINKCTLIAMDLGEMCEDTVTYKCPLLVNTEPEDIDCWCNLTSTWVMYGTCTQSGERRREKRSVALTPHSGMGLETRAETWMSSEGAWKHAQRVESWILRNPGFALLAGFMAYMIGQTGIQRTVFFVLMMLVAPSYGMRCVGVGNRDFVEGVSGGAWVDLVLEHGGCVTTMAQGKPTLDFELTKTTAKEVALLRTYCIEASISNITTATRCPTQGEPYLKEEQDQQYICRRDVVDRGWGNGCGLFGKGGVVTCAKFSCSGKITGNLVQIENLEYTVVVTVHNGDTHAVGNDTSNHGVTATITPRSPSVEVKLPDYGELTLDCEPRSGIDFNEMILMKMKKKTWLVHKQWFLDLPLPWTAGADTSEVHWNYKERMVTFKVPHAKRQDVTVLGSQEGAMHSALAGATEVDSGDGNHMFAGHLKCKVRMEKLRIKGMSYTMCSGKFSIDKEMAETQHGTAVVKVKYEGAGAPCKIPIEIRDVNKEKVVGRIISSTPFAENTNSVTNIELEPPFGDSYIVIGVGNSALTLHWFRKGSSIGKMFESTYRGAKRMAILGETAWDFGSVGGLFTSLGKAVHQVFGSVYTTMFGGVSWIIRILIGLLVLWIGTNSRNTSMAMTCIAVGGITLFLGFTVQADMGCVVSWNGKELKCGSGIFVVDNVHTWTEQYKFQPESPARLASAILNAHKDGVCGIRSTTRLENVMWKQITNELNYVLWEGGHDLTVVAGDVKGVLTKGKRALTPPVNDLKYSWKTWGKAKIFTPEARNSTFLIDGPDTSECPNERRAWNFFEVEDYGFGMFTTNIWMKFREGSSEVCDHRLMSAAIKDQKAVHADMGYWIESSKNQTWQIEKASLIEVKTCLWPKTHTLWSNGVLESQMLIPRSYAGPFSQHNYRQGYATQTVGPWHLGKLEIDFGECPGTTVTIQEDCDHRGPSLRTTTASGKLVTQWCCRSCTMPPLRFLGEDGCWYGMEIRPLSEKEENMVKSQVTAGQGTSETFSMGLLCLTLFVEECLRRRVTRKHMILVVVITFCAIILGGLTWMDLLRALIMLGDTMSGRIGGQIHLAIMAVFKMSPGYVLGVFLRKLTSRETALMVIGMAMTTVFSIPHDLMELIDGISLGLILLKIVTHFDNTQVGTLALSLTFIRSTTPLVMAWRTIMAVFFVVTLIPLCRTSCLQKQSHWVEITALILGAQALPVYLMTLMKGASRRSWPLNEGIMAVGLVSLLGSALLKNDVPLAGPMVAGGLLLAAYVMSGSSADLSLEKAANVQWDEMADITGSSPIIEVKQDEDGSFSIRDVEETNMITLLVKLALITVSGLYPLAIPVTMALWYIWQVKTQRSGALWDVPSPAATQKATLSEGVYRIMQRGLFGKTQVGVGIHMEGVFHTMWHVTRGSVICHETGRLEPSWADVRNDMISYGGGWRLGDKWDKEEDVQVLAIEPGKNPKHVQTKPGLFKTLTGEIGAVTLDFKPGTSGSPIINKKGKVIGLYGNGVVTKSGDYVSAITQAERIGEPDYEVDEDIFRKKRLTIMDLHPGAGKTKRILPSIVREALKRRLRTLILAPTRVVAAEMEEALRGLPIRYQTPAVKSDHTGREIVDLMCHATFTTRLLSSTRVPNYNLIVMDEAHFTDPCSVAARGYISTRVEMGEAAAIFMTATPPGSIDPFPQSNSPIEDIEREIPERSWNTGFDWITDYQGKTVWFVPSIKAGNDIANCLRKSGKRVIQLSRKTFDTEYPKTKLTDWDFVVTTDISEMGANFRAGRVIDPRRCLKPVILTDGPERVILAGPIPVTPASAAQRRGRIGRNPAQEDDQYVFSGDPLKNDEDHAHWTEAKMLLDNIYTPEGIIPTLFGPEREKTQAIDGEFRLRGEQRKTFVELMRRGDLPVWLSYKVASAGISYKDREWCFTGERNNQILEENMEVEIWTREGEKKKLRPKWLDARVYADPMALKDFKEFASGRKSITLDILTEIATLPTYLSSKAKLALDNIVMLHTTEKGGRAYQHALNELPESLETLMLVALLGAMTAGIFLFFMQGKGIGKLSMGLIAIAVASGLLWVAEIQPQWIAASIILEFFLMVLLIPEPEKQRTPQDNQLIYVILTILTIIGLIAANEMGLIEKTKTDFGFYQVKTETTILDVDLRPASAWTLYAVATTILTPMLRHTIENTSANLSLAAIANQAAVLMGLGKGWPLHRMDLGVPLLAMGCYSQVNPTTLTASLVMLLVHYAIIGPGLQAKATREAQKRTAAGIMKNPTVDGITVIDLEPISYDPKFEKQLGQVMLLVLCVGQLLLMRTTWALCEVLTLATGPIMTLWEGNPGRFWNTTIAVSTANIFRGSYLAGAGLAFSLIKNVQTPRRGTGTTGETLGEKWKRQLNSLDRKEFEEYKRSGILEVDRTEAKSALRDGSKIKHAVSRGSSKIRWIVERGMIKPKGKVVDLGCGRGGWSYYMATLKNVTEVKGYTKGGPGHEEPIPMATYGWNLVKLHSGVDVFYKPTEQVDTLLCDIGESSSNPTIEEGRTLRVLKMVEPWLSSKPEFCIKVLNPYMPTVIEELEKLQRRHGGSLVRCPLSRNSTHEMYWVSGASGNIVSSVNTISKMLLNRFTTRHRKPTYEKDVDLGAGTRSVSTETEKPDMTIIGRRLQRLREEHKETWHYDQENPYRTWAYHGSYEAPSTGSASSMVNGVVKLLTKPWDVIPMVTQLAMTDTTPFGQQRVFKEKVDTRTPQPKPGTRMIMTTTANWLWALLGKKKNPRLCTREEFISKVRSNAAIGAVFQEEQGWTSASEAVNDSRFWELVDKERALHQEGKCESCVYNMMGKREKKLGEFGRAKGSRAIWYMWLGARFLEFEALGFLNEDHWFSRENSWSGVEGEGLHRLGYILEDIDKKDGDLIYADDTAGWDTRITEDDLLNEELITEQMAPHHKTLAKAIFKLTYQNKVVKVLRPTPKGAVMDIISRKDQRGSGQVGTYGLNTFTNMEVQLIRQMEAEGVITQDDMQNPKGLKERVEKWLKECGVDRLKRMAISGDDCVVKPLDERFSTSLLFLNDMGKVRKDIPQWEPSKGWKNWQEVPFCSHHFHKIFMKDGRSLVVPCRNQDELIGRARISQGAGWSLRETACLGKAYAQMWSLMYFHRRDLRLASMAICSAVPTEWFPTSRTTWSIHAHHQWMTTEDMLKVWNRVWIEDNPNMTDKTPVHSWEDIPYLGKREDLWCGSLIGLSSRATWAKNIHTAITQVRNLIGKEEYVDYMPVMKRYSAPSESEGVL

SEQ ID NO: 25 - DNA, 11513 bp, Artificial Sequence
  recombinant flavivirus
  CDS (119)..(11002)
agtaaatcctgtgtgctaattgaggtgcattggtctgcaaatcgagttgctaggcaataaacacatttggattaattttaatcgttcgttgagcgattagcagagaactgaccagaacatgtctggtcgtaaagctcagggaaaaaccctgggcgtcaatatggtacgacgaggagttcgctccttgtcaaacatggtcttcacactcgaagatttcgttggggactggcgacagacagccggctacaacctggaccaagtccttgaacagggaggtgtgtccagtttgtttcagaatctcggggtgtccgtaactccgatccaaaggattgtcctgagcggtgaaaatgggctgaagatcgacatccatgtcatcatcccgtatgaaggtctgagcggcgaccaaatgggccagatcgaaaaaatttttaaggtggtgtaccctgtggatgatcatcactttaaggtgatcctgcactatggcacactggtaatcgacggggttacgccgaacatgatcgactatttcggacggccgtatgaaggcatcgccgtgttcgacggcaaaaagatcactgtaacagggaccctgtggaacggcaacaaaattatcgacgagcgcctgatcaaccccgacggctccctgctgttccgagtaaccatcaacggagtgaccggctggcggctgtgcgaacgcattctggcgggaagcggagagggcagaggaagtctgctaacatgcggtgacgtcgaggagaatcctggacctatgagcggaaggaaggcccaagggaagacattaggagtgaacatggtgaggaggggggtgagaagtctcagtaataaaataaaacaaaaaacaaaacaaattggaaacagacctggaccttcaagaggtgttcaaggatttatctttttctttttgttcaacattttgactggaaaaaagatcacagcccacctaaagaggttgtggaaaatgctggacccaagacaaggcttggctgttctaaggaaagtcaagagagtggtggccagtttgatgagaggattgtcctcaaggaaacgccgttcccatgatgttctgactgtgcaattcctaattttgggaatgctgttgatgacgggtggagtgaccttggtgcggaaaaacagatggttgctcctaaatgtgacatctgaggacctcgggaaaacattctctgtgggcacaggcaactgcacaacaaacattttggaagccaagtactggtgcccagactcaatggaatacaactgtcccaatctcagtccaagagaggagccagatgacattgattgctggtgctatggggtggaaaacgttagagtcgcatatggtaagtgtgactcagcaggcaggtctaggaggtcaagaagggccattgacttgcctacgcatgaaaaccatggtttgaagacccggcaagaaaaatggatgactggaagaatgggtgaaaggcaactccaaaagattgagagatggttcgtgaggaaccccttttttgcagtgacggctctgaccattgcctaccttgtgggaagcaacatgacgcaacgagtcgtgattgccctactggtcttggctgttggtccggcctactcagctcactgcattggaattactgacagggatttcattgagggggtgcatggaggaacttgggtttcagctaccctggagcaagacaagtgtgtcactgttatggcccctgacaagccttcattggacatctcactagagacagtagccattgatagacctgctgaggtgaggaaagtgtgttacaatgcagttctcactcatgtgaagattaatgacaagtgccccagcactggagaggcccacctagctgaagagaacgaaggggacaatgcgtgcaagcgcacttattctgatagaggctggggcaatggctgtggcctatttgggaaagggagcattgtggcatgcgccaaattcacttgtgccaaatccatgagtttgtttgaggttgatcagaccaaaattcagtatgtcatcagagcacaattgcatgtaggggccaagcaggaaaattggactaccgacattaagactctcaagtttgatgccctgtcaggctcccaggaagtcgagttcattgggtatggaaaagctacactggaatgccaggtgcaaactgcggtggactttggtaacagttacatcgctgagatggaaacagagagctggatagtggacagacagtgggcccaggacttgaccctgccatggcagagtggaagtggcggggtgtggagagagatgcatcatcttgtcgaatttgaacctccgcatgccgccactatcagagtactggccctgggaaaccaggaaggctccttgaaaacagctcttactggcgcaatgagggttacaaaggacacaaatgacaacaacctttacaaactacatggtggacatgtttcttgcagagtgaaattgtcagctttgacactcaaggggacatcctacaaaatatgcactgacaaaatgttttttgtcaagaacccaactgacactggccatggcactgttgtgatgcaggtgaaagtgtcaaaaggagccccctgcaggattccagtgatagtagctgatgatcttacagcggcaatcaataaaggcattttggttacagttaaccccatcgcctcaaccaatgatgatgaagtgctgattgaggtgaacccaccttttggagacagctacattatcgttgggagaggagattcacgtctcacttaccagtggcacaaagagggaagctcaataggaaagttgttcactcagaccatgaaaggcgtggaacgcctggccgtcatgggagacaccgcctgggatttcagctccgctggagggttcttcacttcggttgggaaaggaattcatacggtgtttggctctgcctttcaggggctatttggcggcttgaactggataacaaaggtcatcatgggggcggtacttatatgggttggcatcaacacaagaaacatgacaatgtccatgagcatgatcttggtaggagtgatcatgatgtttttgtctctaggagttggggcggatcaaggatgcgccatcaactttggcaagagagagctcaagtgcggagatggtatcttcatatttagagactctgatgactggctgaacaagtactcatactatccagaagatcctgtgaagcttgcatcaatagtgaaagcctcttttgaagaagggaagtgtggcctaaattcagttgactcccttgagcatgagatgtggagaagcagggcagatgagatcaatgccatttttgaggaaaacgaggtggacatttctgttgtcgtgcaggatccaaagaatgtttaccagagaggaactcatccattttccagaattcgggatggtctgcagtatggttggaagacttggggtaagaaccttgtgttctccccagggaggaagaatggaagcttcatcatagatggaaagtccaggaaagaatgcccgttttcaaaccgggtctggaattctttccagatagaggagtttgggacgggagtgttcaccacacgcgtgtacatggacgcagtctttgaatacaccatagactgcgatggatctatcttgggtgcagcggtgaacggaaaaaagagtgcccatggctctccaacattttggatgggaagtcatgaagtaaatgggacatggatgatccacaccttggaggcattagattacaaggagtgtgagtggccactgacacatacgattggaacatcagttgaagagagtgaaatgttcatgccgagatcaatcggaggcccagttagctctcacaatcatatccctggatacaaggttcagacgaacggaccttggatgcaggtaccactagaagtgaagagagaagcttgcccagggactagcgtgatcattgatggcaactgtgatggacggggaaaatcaaccagatccaccacggatagcgggaaagttattcctgaatggtgttgccgctcctgcacaatgccgcctgtgagcttccatggtagtgatgggtgttggtatcccatggaaattaggccaaggaaaacgcatgaaagccatctggtgcgctcctgggttacagctggagaaatacatgctgtcccttttggtttggtgagcatgatgatagcaatggaagtggtcctaaggaaaagacagggaccaaagcaaatgttggttggaggagtagtgctcttgggagcaatgctggtcgggcaagtaactctccttgatttgctgaaactcacagtggctgtgggattgcatttccatgagatgaacaatggaggagacgccatgtatatggcgttgattgctgccttttcaatcagaccagggctgctcatcggctttgggctcaggaccctatggagccctcgggaacgccttgtgctgaccctaggagcagccatggtggagattgccttgggtggcgtgatgggcggcctgtggaagtatctaaatgcagtttctctctgcatcctgacaataaatgctgttgcttctaggaaagcatcaaataccatcttgcccctcatggctctgttgacacctgtcactatggctgaggtgagacttgccgcaatgttcttttgtgccgtggttatcataggggtccttcaccagaatttcaaggacacctccatgcagaagactatacctctggtggccctcacactcacatcttacctgggcttgacacaaccttttttgggcctgtgtgcatttctggcaacccgcatatttgggcgaaggagtatcccagtgaatgaggcactcgcagcagctggtctagtgggagtgctggcaggactggcttttcaggagatggagaacttccttggtccgattgcagttggaggactcctgatgatgctggttagcgtggctgggagggtggatgggctagagctcaagaagcttggtgaagtttcatgggaagaggaggcggagatcagcgggagttccgcccgctatgatgtggcactcagtgaacaaggggagttcaagctgctttctgaagagaaagtgccatgggaccaggttgtgatgacctcgctggccttggttggggctgccctccatccatttgctcttctgctggtccttgctgggtggctgtttcatgtcaggggagctaggagaagtggggatgtcttgtgggatattcccactcctaagatcatcgaggaatgtgaacatctggaggatgggatttatggcatattccagtcaaccttcttgggggcctcccagcgaggagtgggagtggcacagggaggggtgttccacacaatgtggcatgtcacaagaggagctttccttgtcaggaatggcaagaagttgattccatcttgggcttcagtaaaggaagaccttgtcgcctatggtggctcatggaagttggaaggcagatgggatggagaggaagaggtccagttgatcgcggctgttccaggaaagaacgtggtcaacgtccagacaaaaccgagcttgttcaaagtgaggaatgggggagaaatcggggctgtcgctcttgactatccgagtggcacttcaggatctcctattgttaacaggaacggagaggtgattgggctgtacggcaatggcatccttgtcggtgacaactccttcgtgtccgccatatcccagactgaggtgaaggaagaaggaaaggaggagctccaagagatcccgacaatgctaaagaaaggaatgacaactgtccttgattttcatcctggagctgggaagacaagacgtttcctcccacagatcttggccgagtgcgcacggagacgcttgcgcactcttgtgttggcccccaccagggttgttctttctgaaatgaaggaggcttttcacggcctggacgtgaaattccacacacaggctttttccgctcacggcagcgggagagaagtcattgatgctatgtgccatgccaccctaacttacaggatgttggaaccaactagggttgttaactgggaagtgatcattatggatgaagcccattttttggatccagctagcatagccgctagaggttgggcagcgcacagagctagggcaaatgaaagtgcaacaatcttgatgacagccacaccgcctgggactagtgatgaatttccacattcaaatggtgaaatagaagatgttcaaacggacatacccagtgagccctggaacacagggcatgactggatcctggctgacaaaaggcccacggcatggttccttccatccatcagagctgcaaatgtcatggctgcctctttgcgtaaggctggaaagagtgtggtggtcctgaacaggaaaacctttgagagagaataccccacgataaagcagaagaaacctgactttatattggccactgacatagctgaaatgggagccaacctttgcgtggagcgagtgctggattgcaggacggcttttaagcctgtgcttgtggatgaagggaggaaggtggcaataaaagggccacttcgtatctccgcatcctctgctgctcaaaggagggggcgcattgggagaaatcccaacagagatggagactcatactactattctgagcctacaagtgaaaataatgcccaccacgtctgctggttggaggcctcaatgctcttggacaacatggaggtgaggggtggaatggtcgccccactctatggcgttgaaggaactaaaacaccagtttcccctggtgaaatgagactgagggatgaccagaggaaagtcttcagagaactagtgaggaattgtgacctgcccgtttggctttcgtggcaagtggccaaggctggtttgaagacgaatgatcgtaagtggtgttttgaaggccctgaggaacatgagatcttgaatgacagcggtgaaacagtgaagtgcagggctcctggaggagcaaagaagcctctgcgcccaaggtggtgtgatgaaagggtgtcatctgaccagagtgcgctgtctgaatttattaagtttgctgaaggtaggaggggagctgctgaagtgctagttgtgctgagtgaactccctgatttcctggctaaaaaaggtggagaggcaatggataccatcagtgtgtttctccactctgaggaaggctctagggcttaccgcaatgcactatcaatgatgcctgaggcaatgacaatagtcatgctgtttatactggctggactactgacatcgggaatggtcatctttttcatgtctcccaaaggcatcagtagaatgtctatggcgatgggcacaatggccggctgtggatatctcatgttccttggaggcgtcaaacccactcacatctcctatatcatgctcatattctttgtcctgatggtggttgtgatccccgagccagggcaacaaaggtccatccaagacaaccaagtggcatacctcattattggcatcctgacgctggtttcagcggtggcagccaacgagctaggcatgctggagaaaaccaaagaggacctctttgggaagaagaacttaattccatctagtgcttcaccctggagttggccggatcttgacctgaagccaggagctgcctggacagtgtacgttggcattgttacaatgctctctccaatgttgcaccactggatcaaagtcgaatatggcaacctgtctctgtctggaatagcccagtcagcctcagtcctttctttcatggacaaggggataccattcatgaagatgaatatctcggtcataatgctgctggtcagtggctggaattcaataacagtgatgcctctgctctgtggcatagggtgcgccatgctccactggtctctcattttacctggaatcaaagcgcagcagtcaaagcttgcacagagaagggtgttccatggcgttgccaagaaccctgtggttgatgggaatccaacagttgacattgaggaagctcctgaaatgcctgccctttatgagaagaaactggctctatatctccttcttgctctcagcctagcttctgttgccatgtgcagaacgcccttttcattggctgaaggcattgtcctagcatcagctgccctagggccgctcatagagggaaacaccagccttctttggaatggacccatggctgtctccatgacaggagtcatgagggggaatcactatgcttttgtgggagtcatgtacaatctatggaagatgaaaactggacgccgggggagcgcgaatggaaaaactttgggtgaagtctggaagagggaactgaatctgttggacaagcgacagtttgagttgtataaaaggaccgacattgtggaggtggatcgtgatacggcacgcaggcatttggccgaagggaaggtggacaccggggtggcggtctccagggggaccgcaaagttaaggtggttccatgagcgtggctatgtcaagctggaaggtagggtgattgacctggggtgtggccgcggaggctggtgttactacgctgctgcgcaaaaggaagtgagtggggtcaaaggatttactcttggaagagacggccatgagaaacccatgaatgtgcaaagtctgggatggaacatcatcaccttcaaggacaaaactgatatccaccgcctagaaccagtgaaatgtgacacccttttgtgtgacattggagagtcatcatcgtcatcggtcacagagggggaaaggaccgtgagagttcttgatactgtagaaaaatggctggcttgtggggttgacaacttctgtgtgaaggtgttagctccatacatgccagatgttctcgagaaactggaattgctccaaaggaggtttggcggaacagtgatcaggaaccctctctccaggaattccactcatgaaatgtactacgtgtctggagcccgcagcaatgtcacatttactgtgaaccaaacatcccgcctcctgatgaggagaatgaggcgtccaactggaaaagtgaccctggaggctgacgtcatcctcccaattgggacacgcagtgttgagacagacaagggacccctggacaaagaggccatagaagaaagggttgagaggataaaatctgagtacatgacctcttggttttatgacaatgacaacccctacaggacctggcactactgtggctcctatgtcacaaaaacctcaggaagtgcggcgagcatggtaaatggtgttattaaaattctgacatatccatgggacaggatagaggaggtcacaagaatggcaatgactgacacaaccccttttggacagcaaagagtgtttaaagaaaaagttgacaccagagcaaaggatccaccagcgggaactaggaagatcatgaaagttgtcaacaggtggctgttccgccacctggccagagaaaagaaccccagactgtgcacaaaggaagaatttattgcaaaagtccgaagtcatgcagccattggagcttacctggaagaacaagaacagtggaagactgccaatgaggctgtccaagacccaaagttctgggaactggtggatgaagaaaggaagctgcaccaacaaggcaggtgtcggacttgtgtgtacaacatgatggggaaaagagagaagaagctgtcagagtttgggaaagcaaagggaagccgtgccatatggtatatgtggctgggagcgcggtatcttgagtttgaggccctgggattcctgaatgaggaccattgggcttccagggaaaactcaggaggaggagtggaaggcattggcttacaatacctaggatatgtgatcagagacctggctgcaatggatggtggtggattctacgcggatgacaccgctggatgggacacgcgcatcacagaggcagaccttgatgatgaacaggagatcttgaactacatgagcccacatcacaaaaaactggcacaagcagtgatggaaatgacatacaagaacaaagtggtgaaagtgttgagaccagccccaggagggaaagcctacatggatgtcataagtcgacgagaccagagaggatccgggcaggtagtgacttatgctctgaacaccatcaccaacttgaaagtccaattgatcagaatggcagaagcagagatggtgatacatcaccaacatgttcaagattgtgatgaatcagttctgaccaggctggaggcatggctcactgagcacggatgtaacagactgaagaggatggcggtgagtggagacgactgtgtggtccggcccatcgatgacaggttcggcctggccctgtcccatctcaacgccatgtccaaggttagaaaggacatatctgaatggcagccatcaaaagggtggaatgattgggagaatgtgcccttctgttcccaccacttccatgaactacagctgaaggatggcaggaggattgtggtgccttgccgagaacaggacgagctcattgggagaggaagggtgtctccaggaaacggctggatgatcaaggaaacagcttgcctcagcaaagcctatgccaacatgtggtcactgatgtattttcacaaaagggacatgaggctactgtcattggctgtttcctcagctgttcccacctcatgggttccacaaggacgcacaacatggtcgattcatgggaaaggggagtggatgaccacggaagacatgcttgaggtgtggaacagagtatggataaccaacaacccacacatgcaggacaagacaatggtgaaaaaatggagagatgtcccttatctaaccaagagacaagacaagctgtgcggatcactgattggaatgaccaatagggccacctgggcctcccacatccatttggtcatccatcgtatccgaacgctgattggacaggagaaatacactgactacctaacagtcatggacaggtattctgtggatgctgacctgcaactgggtgagcttatctgaaacaccatctaacaggaataaccgggatacaaaccacgggtggagaaccggactccccacaacctgaaaccgggatataaaccacggctggagaaccggactccgcacttaaaatgaaacagaaaccgggataaaaactacggatggagaaccggactccacacattgagacagaagaagttgtcagcccagaaccccacacgagttttgccactgctaagctgtgaggcagtgcaggctgggacagccgacctccaggttgcgaaaaacctggtttctgggacctcccaccccagagtaaaaagaacggagcctccgctaccaccctcccacgtggtggtagaaagacggggtctagaggttagaggagaccctccagggaacaaatagtgggaccatattgacgccagggaaagaccggagtggttctctgcttttcctccagaggtctgtgagcacagtttgctcaagaataagcagacctttggatgacaaacacaaaaccact

SEQ ID NO: 26 - protein, 3628 aa, Artificial Sequence
  Synthetic Construct
MSGRKAQGKTLGVNMVRRGVRSLSNMVFTLEDFVGDWRQTAGYNLDQVLEQGGVSSLFQNLGVSVTPIQRIVLSGENGLKIDIHVIIPYEGLSGDQMGQIEKIFKVVYPVDDHHFKVILHYGTLVIDGVTPNMIDYFGRPYEGIAVFDGKKITVTGTLWNGNKIIDERLINPDGSLLFRVTINGVTGWRLCERILAGSGEGRGSLLTCGDVEENPGPMSGRKAQGKTLGVNMVRRGVRSLSNKIKQKTKQIGNRPGPSRGVQGFIFFFLFNILTGKKITAHLKRLWKMLDPRQGLAVLRKVKRVVASLMRGLSSRKRRSHDVLTVQFLILGMLLMTGGVTLVRKNRWLLLNVTSEDLGKTFSVGTGNCTTNILEAKYWCPDSMEYNCPNLSPREEPDDIDCWCYGVENVRVAYGKCDSAGRSRRSRRAIDLPTHENHGLKTRQEKWMTGRMGERQLQKIERWFVRNPFFAVTALTIAYLVGSNMTQRVVIALLVLAVGPAYSAHCIGITDRDFIEGVHGGTWVSATLEQDKCVTVMAPDKPSLDISLETVAIDRPAEVRKVCYNAVLTHVKINDKCPSTGEAHLAEENEGDNACKRTYSDRGWGNGCGLFGKGSIVACAKFTCAKSMSLFEVDQTKIQYVIRAQLHVGAKQENWTTDIKTLKFDALSGSQEVEFIGYGKATLECQVQTAVDFGNSYIAEMETESWIVDRQWAQDLTLPWQSGSGGVWREMHHLVEFEPPHAATIRVLALGNQEGSLKTALTGAMRVTKDTNDNNLYKLHGGHVSCRVKLSALTLKGTSYKICTDKMFFVKNPTDTGHGTVVMQVKVSKGAPCRIPVIVADDLTAAINKGILVTVNPIASTNDDEVLIEVNPPFGDSYIIVGRGDSRLTYQWHKEGSSIGKLFTQTMKGVERLAVMGDTAWDFSSAGGFFTSVGKGIHTVFGSAFQGLFGGLNWITKVIMGAVLIWVGINTRNMTMSMSMILVGVIMMFLSLGVGADQGCAINFGKRELKCGDGIFIFRDSDDWLNKYSYYPEDPVKLASIVKASFEEGKCGLNSVDSLEHEMWRSRADEINAIFEENEVDISVVVQDPKNVYQRGTHPFSRIRDGLQYGWKTWGKNLVFSPGRKNGSFIIDGKSRKECPFSNRVWNSFQIEEFGTGVFTTRVYMDAVFEYTIDCDGSILGAAVNGKKSAHGSPTFWMGSHEVNGTWMIHTLEALDYKECEWPLTHTIGTSVEESEMFMPRSIGGPVSSHNHIPGYKVQTNGPWMQVPLEVKREACPGTSVIIDGNCDGRGKSTRSTTDSGKVIPEWCCRSCTMPPVSFHGSDGCWYPMEIRPRKTHESHLVRSWVTAGEIHAVPFGLVSMMIAMEVVLRKRQGPKQMLVGGVVLLGAMLVGQVTLLDLLKLTVAVGLHFHEMNNGGDAMYMALIAAFSIRPGLLIGFGLRTLWSPRERLVLTLGAAMVEIALGGVMGGLWKYLNAVSLCILTINAVASRKASNTILPLMALLTPVTMAEVRLAAMFFCAVVIIGVLHQNFKDTSMQKTIPLVALTLTSYLGLTQPFLGLCAFLATRIFGRRSIPVNEALAAAGLVGVLAGLAFQEMENFLGPIAVGGLLMMLVSVAGRVDGLELKKLGEVSWEEEAEISGSSARYDVALSEQGEFKLLSEEKVPWDQVVMTSLALVGAALHPFALLLVLAGWLFHVRGARRSGDVLWDIPTPKIIEECEHLEDGIYGIFQSTFLGASQRGVGVAQGGVFHTMWHVTRGAFLVRNGKKLIPSWASVKEDLVAYGGSWKLEGRWDGEEEVQLIAAVPGKNVVNVQTKPSLFKVRNGGEIGAVALDYPSGTSGSPIVNRNGEVIGLYGNGILVGDNSFVSAISQTEVKEEGKEELQEIPTMLKKGMTTVLDFHPGAGKTRRFLPQILAECARRRLRTLVLAPTRVVLSEMKEAFHGLDVKFHTQAFSAHGSGREVIDAMCHATLTYRMLEPTRVVNWEVIIMDEAHFLDPASIAARGWAAHRARANESATILMTATPPGTSDEFPHSNGEIEDVQTDIPSEPWNTGHDWILADKRPTAWFLPSIRAANVMAASLRKAGKSVVVLNRKTFEREYPTIKQKKPDFILATDIAEMGANLCVERVLDCRTAFKPVLVDEGRKVAIKGPLRISASSAAQRRGRIGRNPNRDGDSYYYSEPTSENNAHHVCWLEASMLLDNMEVRGGMVAPLYGVEGTKTPVSPGEMRLRDDQRKVFRELVRNCDLPVWLSWQVAKAGLKTNDRKWCFEGPEEHEILNDSGETVKCRAPGGAKKPLRPRWCDERVSSDQSALSEFIKFAEGRRGAAEVLVVLSELPDFLAKKGGEAMDTISVFLHSEEGSRAYRNALSMMPEAMTIVMLFILAGLLTSGMVIFFMSPKGISRMSMAMGTMAGCGYLMFLGGVKPTHISYIMLIFFVLMVVVIPEPGQQRSIQDNQVAYLIIGILTLVSAVAANELGMLEKTKEDLFGKKNLIPSSASPWSWPDLDLKPGAAWTVYVGIVTMLSPMLHHWIKVEYGNLSLSGIAQSASVLSFMDKGIPFMKMNISVIMLLVSGWNSITVMPLLCGIGCAMLHWSLILPGIKAQQSKLAQRRVFHGVAKNPVVDGNPTVDIEEAPEMPALYEKKLALYLLLALSLASVAMCRTPFSLAEGIVLASAALGPLIEGNTSLLWNGPMAVSMTGVMRGNHYAFVGVMYNLWKMKTGRRGSANGKTLGEVWKRELNLLDKRQFELYKRTDIVEVDRDTARRHLAEGKVDTGVAVSRGTAKLRWFHERGYVKLEGRVIDLGCGRGGWCYYAAAQKEVSGVKGFTLGRDGHEKPMNVQSLGWNIITFKDKTDIHRLEPVKCDTLLCDIGESSSSSVTEGERTVRVLDTVEKWLACGVDNFCVKVLAPYMPDVLEKLELLQRRFGGTVIRNPLSRNSTHEMYYVSGARSNVTFTVNQTSRLLMRRMRRPTGKVTLEADVILPIGTRSVETDKGPLDKEAIEERVERIKSEYMTSWFYDNDNPYRTWHYCGSYVTKTSGSAASMVNGVIKILTYPWDRIEEVTRMAMTDTTPFGQQRVFKEKVDTRAKDPPAGTRKIMKVVNRWLFRHLAREKNPRLCTKEEFIAKVRSHAAIGAYLEEQEQWKTANEAVQDPKFWELVDEERKLHQQGRCRTCVYNMMGKREKKLSEFGKAKGSRAIWYMWLGARYLEFEALGFLNEDHWASRENSGGGVEGIGLQYLGYVIRDLAAMDGGGFYADDTAGWDTRITEADLDDEQEILNYMSPHHKKLAQAVMEMTYKNKVVKVLRPAPGGKAYMDVISRRDQRGSGQVVTYALNTITNLKVQLIRMAEAEMVIHHQHVQDCDESVLTRLEAWLTEHGCNRLKRMAVSGDDCVVRPIDDRFGLALSHLNAMSKVRKDISEWQPSKGWNDWENVPFCSHHFHELQLKDGRRIVVPCREQDELIGRGRVSPGNGWMIKETACLSKAYANMWSLMYFHKRDMRLLSLAVSSAVPTSWVPQGRTTWSIHGKGEWMTTEDMLEVWNRVWITNNPHMQDKTMVKKWRDVPYLTKRQDKLCGSLIGMTNRATWASHIHLVIHRIRTLIGQEKYTDYLTVMDRYSVDADLQLGELI

SEQ ID NO: 27 - DNA, 11552 bp, Artificial Sequence
  recombinant flavivirus
  CDS (119)..(11041)
agtaaatcctgtgtgctaattgaggtgcattggtctgcaaatcgagttgctaggcaataaacacatttggattaattttaatcgttcgttgagcgattagcagagaactgaccagaacatgtctggtcgtaaagctcagggaaaaaccctgggcgtcaatatggtacgacgaggagttcgctccttgtcaaacaaaataaaacaaaaaacaaaacaaattggaaacagacctatggtcttcacactcgaagatttcgttggggactggcgacagacagccggctacaacctggaccaagtccttgaacagggaggtgtgtccagtttgtttcagaatctcggggtgtccgtaactccgatccaaaggattgtcctgagcggtgaaaatgggctgaagatcgacatccatgtcatcatcccgtatgaaggtctgagcggcgaccaaatgggccagatcgaaaaaatttttaaggtggtgtaccctgtggatgatcatcactttaaggtgatcctgcactatggcacactggtaatcgacggggttacgccgaacatgatcgactatttcggacggccgtatgaaggcatcgccgtgttcgacggcaaaaagatcactgtaacagggaccctgtggaacggcaacaaaattatcgacgagcgcctgatcaaccccgacggctccctgctgttccgagtaaccatcaacggagtgaccggctggcggctgtgcgaacgcattctggcgggaagcggagagggcagaggaagtctgctaacatgcggtgacgtcgaggagaatcctggacctatgagcggaaggaaggcccaagggaagacattaggagtgaacatggtgaggaggggggtgagaagtctcagtaataagattaagcagaagactaagcagatcggtaatcggccaggaccttcaagaggtgttcaaggatttatctttttctttttgttcaacattttgactggaaaaaagatcacagcccacctaaagaggttgtggaaaatgctggacccaagacaaggcttggctgttctaaggaaagtcaagagagtggtggccagtttgatgagaggattgtcctcaaggaaacgccgttcccatgatgttctgactgtgcaattcctaattttgggaatgctgttgatgacgggtggagtgaccttggtgcggaaaaacagatggttgctcctaaatgtgacatctgaggacctcgggaaaacattctctgtgggcacaggcaactgcacaacaaacattttggaagccaagtactggtgcccagactcaatggaatacaactgtcccaatctcagtccaagagaggagccagatgacattgattgctggtgctatggggtggaaaacgttagagtcgcatatggtaagtgtgactcagcaggcaggtctaggaggtcaagaagggccattgacttgcctacgcatgaaaaccatggtttgaagacccggcaagaaaaatggatgactggaagaatgggtgaaaggcaactccaaaagattgagagatggttcgtgaggaaccccttttttgcagtgacggctctgaccattgcctaccttgtgggaagcaacatgacgcaacgagtcgtgattgccctactggtcttggctgttggtccggcctactcagctcactgcattggaattactgacagggatttcattgagggggtgcatggaggaacttgggtttcagctaccctggagcaagacaagtgtgtcactgttatggcccctgacaagccttcattggacatctcactagagacagtagccattgatagacctgctgaggtgaggaaagtgtgttacaatgcagttctcactcatgtgaagattaatgacaagtgccccagcactggagaggcccacctagctgaagagaacgaaggggacaatgcgtgcaagcgcacttattctgatagaggctggggcaatggctgtggcctatttgggaaagggagcattgtggcatgcgccaaattcacttgtgccaaatccatgagtttgtttgaggttgatcagaccaaaattcagtatgtcatcagagcacaattgcatgtaggggccaagcaggaaaattggactaccgacattaagactctcaagtttgatgccctgtcaggctcccaggaagtcgagttcattgggtatggaaaagctacactggaatgccaggtgcaaactgcggtggactttggtaacagttacatcgctgagatggaaacagagagctggatagtggacagacagtgggcccaggacttgaccctgccatggcagagtggaagtggcggggtgtggagagagatgcatcatcttgtcgaatttgaacctccgcatgccgccactatcagagtactggccctgggaaaccaggaaggctccttgaaaacagctcttactggcgcaatgagggttacaaaggacacaaatgacaacaacctttacaaactacatggtggacatgtttcttgcagagtgaaattgtcagctttgacactcaaggggacatcctacaaaatatgcactgacaaaatgttttttgtcaagaacccaactgacactggccatggcactgttgtgatgcaggtgaaagtgtcaaaaggagccccctgcaggattccagtgatagtagctgatgatcttacagcggcaatcaataaaggcattttggttacagttaaccccatcgcctcaaccaatgatgatgaagtgctgattgaggtgaacccaccttttggagacagctacattatcgttgggagaggagattcacgtctcacttaccagtggcacaaagagggaagctcaataggaaagttgttcactcagaccatgaaaggcgtggaacgcctggccgtcatgggagacaccgcctgggatttcagctccgctggagggttcttcacttcggttgggaaaggaattcatacggtgtttggctctgcctttcaggggctatttggcggcttgaactggataacaaaggtcatcatgggggcggtacttatatgggttggcatcaacacaagaaacatgacaatgtccatgagcatgatcttggtaggagtgatcatgatgtttttgtctctaggagttggggcggatcaaggatgcgccatcaactttggcaagagagagctcaagtgcggagatggtatcttcatatttagagactctgatgactggctgaacaagtactcatactatccagaagatcctgtgaagcttgcatcaatagtgaaagcctcttttgaagaagggaagtgtggcctaaattcagttgactcccttgagcatgagatgtggagaagcagggcagatgagatcaatgccatttttgaggaaaacgaggtggacatttctgttgtcgtgcaggatccaaagaatgtttaccagagaggaactcatccattttccagaattcgggatggtctgcagtatggttggaagacttggggtaagaaccttgtgttctccccagggaggaagaatggaagcttcatcatagatggaaagtccaggaaagaatgcccgttttcaaaccgggtctggaattctttccagatagaggagtttgggacgggagtgttcaccacacgcgtgtacatggacgcagtctttgaatacaccatagactgcgatggatctatcttgggtgcagcggtgaacggaaaaaagagtgcccatggctctccaacattttggatgggaagtcatgaagtaaatgggacatggatgatccacaccttggaggcattagattacaaggagtgtgagtggccactgacacatacgattggaacatcagttgaagagagtgaaatgttcatgccgagatcaatcggaggcccagttagctctcacaatcatatccctggatacaaggttcagacgaacggaccttggatgcaggtaccactagaagtgaagagagaagcttgcccagggactagcgtgatcattgatggcaactgtgatggacggggaaaatcaaccagatccaccacggatagcgggaaagttattcctgaatggtgttgccgctcctgcacaatgccgcctgtgagcttccatggtagtgatgggtgttggtatcccatggaaattaggccaaggaaaacgcatgaaagccatctggtgcgctcctgggttacagctggagaaatacatgctgtcccttttggtttggtgagcatgatgatagcaatggaagtggtcctaaggaaaagacagggaccaaagcaaatgttggttggaggagtagtgctcttgggagcaatgctggtcgggcaagtaactctccttgatttgctgaaactcacagtggctgtgggattgcatttccatgagatgaacaatggaggagacgccatgtatatggcgttgattgctgccttttcaatcagaccagggctgctcatcggctttgggctcaggaccctatggagccctcgggaacgccttgtgctgaccctaggagcagccatggtggagattgccttgggtggcgtgatgggcggcctgtggaagtatctaaatgcagtttctctctgcatcctgacaataaatgctgttgcttctaggaaagcatcaaataccatcttgcccctcatggctctgttgacacctgtcactatggctgaggtgagacttgccgcaatgttcttttgtgccgtggttatcataggggtccttcaccagaatttcaaggacacctccatgcagaagactatacctctggtggccctcacactcacatcttacctgggcttgacacaaccttttttgggcctgtgtgcatttctggcaacccgcatatttgggcgaaggagtatcccagtgaatgaggcactcgcagcagctggtctagtgggagtgctggcaggactggcttttcaggagatggagaacttccttggtccgattgcagttggaggactcctgatgatgctggttagcgtggctgggagggtggatgggctagagctcaagaagcttggtgaagtttcatgggaagaggaggcggagatcagcgggagttccgcccgctatgatgtggcactcagtgaacaaggggagttcaagctgctttctgaagagaaagtgccatgggaccaggttgtgatgacctcgctggccttggttggggctgccctccatccatttgctcttctgctggtccttgctgggtggctgtttcatgtcaggggagctaggagaagtggggatgtcttgtgggatattcccactcctaagatcatcgaggaatgtgaacatctggaggatgggatttatggcatattccagtcaaccttcttgggggcctcccagcgaggagtgggagtggcacagggaggggtgttccacacaatgtggcatgtcacaagaggagctttccttgtcaggaatggcaagaagttgattccatcttgggcttcagtaaaggaagaccttgtcgcctatggtggctcatggaagttggaaggcagatgggatggagaggaagaggtccagttgatcgcggctgttccaggaaagaacgtggtcaacgtccagacaaaaccgagcttgttcaaagtgaggaatgggggagaaatcggggctgtcgctcttgactatccgagtggcacttcaggatctcctattgttaacaggaacggagaggtgattgggctgtacggcaatggcatccttgtcggtgacaactccttcgtgtccgccatatcccagactgaggtgaaggaagaaggaaaggaggagctccaagagatcccgacaatgctaaagaaaggaatgacaactgtccttgattttcatcctggagctgggaagacaagacgtttcctcccacagatcttggccgagtgcgcacggagacgcttgcgcactcttgtgttggcccccaccagggttgttctttctgaaatgaaggaggcttttcacggcctggacgtgaaattccacacacaggctttttccgctcacggcagcgggagagaagtcattgatgctatgtgccatgccaccctaacttacaggatgttggaaccaactagggttgttaactgggaagtgatcattatggatgaagcccattttttggatccagctagcatagccgctagaggttgggcagcgcacagagctagggcaaatgaaagtgcaacaatcttgatgacagccacaccgcctgggactagtgatgaatttccacattcaaatggtgaaatagaagatgttcaaacggacatacccagtgagccctggaacacagggcatgactggatcctggctgacaaaaggcccacggcatggttccttccatccatcagagctgcaaatgtcatggctgcctctttgcgtaaggctggaaagagtgtggtggtcctgaacaggaaaacctttgagagagaataccccacgataaagcagaagaaacctgactttatattggccactgacatagctgaaatgggagccaacctttgcgtggagcgagtgctggattgcaggacggcttttaagcctgtgcttgtggatgaagggaggaaggtggcaataaaagggccacttcgtatctccgcatcctctgctgctcaaaggagggggcgcattgggagaaatcccaacagagatggagactcatactactattctgagcctacaagtgaaaataatgcccaccacgtctgctggttggaggcctcaatgctcttggacaacatggaggtgaggggtggaatggtcgccccactctatggcgttgaaggaactaaaacaccagtttcccctggtgaaatgagactgagggatgaccagaggaaagtcttcagagaactagtgaggaattgtgacctgcccgtttggctttcgtggcaagtggccaaggctggtttgaagacgaatgatcgtaagtggtgttttgaaggccctgaggaacatgagatcttgaatgacagcggtgaaacagtgaagtgcagggctcctggaggagcaaagaagcctctgcgcccaaggtggtgtgatgaaagggtgtcatctgaccagagtgcgctgtctgaatttattaagtttgctgaaggtaggaggggagctgctgaagtgctagttgtgctgagtgaactccctgatttcctggctaaaaaaggtggagaggcaatggataccatcagtgtgtttctccactctgaggaaggctctagggcttaccgcaatgcactatcaatgatgcctgaggcaatgacaatagtcatgctgtttatactggctggactactgacatcgggaatggtcatctttttcatgtctcccaaaggcatcagtagaatgtctatggcgatgggcacaatggccggctgtggatatctcatgttccttggaggcgtcaaacccactcacatctcctatatcatgctcatattctttgtcctgatggtggttgtgatccccgagccagggcaacaaaggtccatccaagacaaccaagtggcatacctcattattggcatcctgacgctggtttcagcggtggcagccaacgagctaggcatgctggagaaaaccaaagaggacctctttgggaagaagaacttaattccatctagtgcttcaccctggagttggccggatcttgacctgaagccaggagctgcctggacagtgtacgttggcattgttacaatgctctctccaatgttgcaccactggatcaaagtcgaatatggcaacctgtctctgtctggaatagcccagtcagcctcagtcctttctttcatggacaaggggataccattcatgaagatgaatatctcggtcataatgctgctggtcagtggctggaattcaataacagtgatgcctctgctctgtggcatagggtgcgccatgctccactggtctctcattttacctggaatcaaagcgcagcagtcaaagcttgcacagagaagggtgttccatggcgttgccaagaaccctgtggttgatgggaatccaacagttgacattgaggaagctcctgaaatgcctgccctttatgagaagaaactggctctatatctccttcttgctctcagcctagcttctgttgccatgtgcagaacgcccttttcattggctgaaggcattgtcctagcatcagctgccctagggccgctcatagagggaaacaccagccttctttggaatggacccatggctgtctccatgacaggagtcatgagggggaatcactatgcttttgtgggagtcatgtacaatctatggaagatgaaaactggacgccgggggagcgcgaatggaaaaactttgggtgaagtctggaagagggaactgaatctgttggacaagcgacagtttgagttgtataaaaggaccgacattgtggaggtggatcgtgatacggcacgcaggcatttggccgaagggaaggtggacaccggggtggcggtctccagggggaccgcaaagttaaggtggttccatgagcgtggctatgtcaagctggaaggtagggtgattgacctggggtgtggccgcggaggctggtgttactacgctgctgcgcaaaaggaagtgagtggggtcaaaggatttactcttggaagagacggccatgagaaacccatgaatgtgcaaagtctgggatggaacatcatcaccttcaaggacaaaactgatatccaccgcctagaaccagtgaaatgtgacacccttttgtgtgacattggagagtcatcatcgtcatcggtcacagagggggaaaggaccgtgagagttcttgatactgtagaaaaatggctggcttgtggggttgacaacttctgtgtgaaggtgttagctccatacatgccagatgttctcgagaaactggaattgctccaaaggaggtttggcggaacagtgatcaggaaccctctctccaggaattccactcatgaaatgtactacgtgtctggagcccgcagcaatgtcacatttactgtgaaccaaacatcccgcctcctgatgaggagaatgaggcgtccaactggaaaagtgaccctggaggctgacgtcatcctcccaattgggacacgcagtgttgagacagacaagggacccctggacaaagaggccatagaagaaagggttgagaggataaaatctgagtacatgacctcttggttttatgacaatgacaacccctacaggacctggcactactgtggctcctatgtcacaaaaacctcaggaagtgcggcgagcatggtaaatggtgttattaaaattctgacatatccatgggacaggatagaggaggtcacaagaatggcaatgactgacacaaccccttttggacagcaaagagtgtttaaagaaaaagttgacaccagagcaaaggatccaccagcgggaactaggaagatcatgaaagttgtcaacaggtggctgttccgccacctggccagagaaaagaaccccagactgtgcacaaaggaagaatttattgcaaaagtccgaagtcatgcagccattggagcttacctggaagaacaagaacagtggaagactgccaatgaggctgtccaagacccaaagttctgggaactggtggatgaagaaaggaagctgcaccaacaaggcaggtgtcggacttgtgtgtacaacatgatggggaaaagagagaagaagctgtcagagtttgggaaagcaaagggaagccgtgccatatggtatatgtggctgggagcgcggtatcttgagtttgaggccctgggattcctgaatgaggaccattgggcttccagggaaaactcaggaggaggagtggaaggcattggcttacaatacctaggatatgtgatcagagacctggctgcaatggatggtggtggattctacgcggatgacaccgctggatgggacacgcgcatcacagaggcagaccttgatgatgaacaggagatcttgaactacatgagcccacatcacaaaaaactggcacaagcagtgatggaaatgacatacaagaacaaagtggtgaaagtgttgagaccagccccaggagggaaagcctacatggatgtcataagtcgacgagaccagagaggatccgggcaggtagtgacttatgctctgaacaccatcaccaacttgaaagtccaattgatcagaatggcagaagcagagatggtgatacatcaccaacatgttcaagattgtgatgaatcagttctgaccaggctggaggcatggctcactgagcacggatgtaacagactgaagaggatggcggtgagtggagacgactgtgtggtccggcccatcgatgacaggttcggcctggccctgtcccatctcaacgccatgtccaaggttagaaaggacatatctgaatggcagccatcaaaagggtggaatgattgggagaatgtgcccttctgttcccaccacttccatgaactacagctgaaggatggcaggaggattgtggtgccttgccgagaacaggacgagctcattgggagaggaagggtgtctccaggaaacggctggatgatcaaggaaacagcttgcctcagcaaagcctatgccaacatgtggtcactgatgtattttcacaaaagggacatgaggctactgtcattggctgtttcctcagctgttcccacctcatgggttccacaaggacgcacaacatggtcgattcatgggaaaggggagtggatgaccacggaagacatgcttgaggtgtggaacagagtatggataaccaacaacccacacatgcaggacaagacaatggtgaaaaaatggagagatgtcccttatctaaccaagagacaagacaagctgtgcggatcactgattggaatgaccaatagggccacctgggcctcccacatccatttggtcatccatcgtatccgaacgctgattggacaggagaaatacactgactacctaacagtcatggacaggtattctgtggatgctgacctgcaactgggtgagcttatctgaaacaccatctaacaggaataaccgggatacaaaccacgggtggagaaccggactccccacaacctgaaaccgggatataaaccacggctggagaaccggactccgcacttaaaatgaaacagaaaccgggataaaaactacggatggagaaccggactccacacattgagacagaagaagttgtcagcccagaaccccacacgagttttgccactgctaagctgtgaggcagtgcaggctgggacagccgacctccaggttgcgaaaaacctggtttctgggacctcccaccccagagtaaaaagaacggagcctccgctaccaccctcccacgtggtggtagaaagacggggtctagaggttagaggagaccctccagggaacaaatagtgggaccatattgacgccagggaaagaccggagtggttctctgcttttcctccagaggtctgtgagcacagtttgctcaagaataagcagacctttggatgacaaacacaaaaccact

SEQ ID NO: 28 - protein, 3641 aa, Artificial Sequence
  Synthetic Construct
MSGRKAQGKTLGVNMVRRGVRSLSNKIKQKTKQIGNRPMVFTLEDFVGDWRQTAGYNLDQVLEQGGVSSLFQNLGVSVTPIQRIVLSGENGLKIDIHVIIPYEGLSGDQMGQIEKIFKVVYPVDDHHFKVILHYGTLVIDGVTPNMIDYFGRPYEGIAVFDGKKITVTGTLWNGNKIIDERLINPDGSLLFRVTINGVTGWRLCERILAGSGEGRGSLLTCGDVEENPGPMSGRKAQGKTLGVNMVRRGVRSLSNKIKQKTKQIGNRPGPSRGVQGFIFFFLFNILTGKKITAHLKRLWKMLDPRQGLAVLRKVKRVVASLMRGLSSRKRRSHDVLTVQFLILGMLLMTGGVTLVRKNRWLLLNVTSEDLGKTFSVGTGNCTTNILEAKYWCPDSMEYNCPNLSPREEPDDIDCWCYGVENVRVAYGKCDSAGRSRRSRRAIDLPTHENHGLKTRQEKWMTGRMGERQLQKIERWFVRNPFFAVTALTIAYLVGSNMTQRVVIALLVLAVGPAYSAHCIGITDRDFIEGVHGGTWVSATLEQDKCVTVMAPDKPSLDISLETVAIDRPAEVRKVCYNAVLTHVKINDKCPSTGEAHLAEENEGDNACKRTYSDRGWGNGCGLFGKGSIVACAKFTCAKSMSLFEVDQTKIQYVIRAQLHVGAKQENWTTDIKTLKFDALSGSQEVEFIGYGKATLECQVQTAVDFGNSYIAEMETESWIVDRQWAQDLTLPWQSGSGGVWREMHHLVEFEPPHAATIRVLALGNQEGSLKTALTGAMRVTKDTNDNNLYKLHGGHVSCRVKLSALTLKGTSYKICTDKMFFVKNPTDTGHGTVVMQVKVSKGAPCRIPVIVADDLTAAINKGILVTVNPIASTNDDEVLIEVNPPFGDSYIIVGRGDSRLTYQWHKEGSSIGKLFTQTMKGVERLAVMGDTAWDFSSAGGFFTSVGKGIHTVFGSAFQGLFGGLNWITKVIMGAVLIWVGINTRNMTMSMSMILVGVIMMFLSLGVGADQGCAINFGKRELKCGDGIFIFRDSDDWLNKYSYYPEDPVKLASIVKASFEEGKCGLNSVDSLEHEMWRSRADEINAIFEENEVDISVVVQDPKNVYQRGTHPFSRIRDGLQYGWKTWGKNLVFSPGRKNGSFIIDGKSRKECPFSNRVWNSFQIEEFGTGVFTTRVYMDAVFEYTIDCDGSILGAAVNGKKSAHGSPTFWMGSHEVNGTWMIHTLEALDYKECEWPLTHTIGTSVEESEMFMPRSIGGPVSSHNHIPGYKVQTNGPWMQVPLEVKREACPGTSVIIDGNCDGRGKSTRSTTDSGKVIPEWCCRSCTMPPVSFHGSDGCWYPMEIRPRKTHESHLVRSWVTAGEIHAVPFGLVSMMIAMEVVLRKRQGPKQMLVGGVVLLGAMLVGQVTLLDLLKLTVAVGLHFHEMNNGGDAMYMALIAAFSIRPGLLIGFGLRTLWSPRERLVLTLGAAMVEIALGGVMGGLWKYLNAVSLCILTINAVASRKASNTILPLMALLTPVTMAEVRLAAMFFCAVVIIGVLHQNFKDTSMQKTIPLVALTLTSYLGLTQPFLGLCAFLATRIFGRRSIPVNEALAAAGLVGVLAGLAFQEMENFLGPIAVGGLLMMLVSVAGRVDGLELKKLGEVSWEEEAEISGSSARYDVALSEQGEFKLLSEEKVPWDQVVMTSLALVGAALHPFALLLVLAGWLFHVRGARRSGDVLWDIPTPKIIEECEHLEDGIYGIFQSTFLGASQRGVGVAQGGVFHTMWHVTRGAFLVRNGKKLIPSWASVKEDLVAYGGSWKLEGRWDGEEEVQLIAAVPGKNVVNVQTKPSLFKVRNGGEIGAVALDYPSGTSGSPIVNRNGEVIGLYGNGILVGDNSFVSAISQTEVKEEGKEELQEIPTMLKKGMTTVLDFHPGAGKTRRFLPQILAECARRRLRTLVLAPTRVVLSEMKEAFHGLDVKFHTQAFSAHGSGREVIDAMCHATLTYRMLEPTRVVNWEVIIMDEAHFLDPASIAARGWAAHRARANESATILMTATPPGTSDEFPHSNGEIEDVQTDIPSEPWNTGHDWILADKRPTAWFLPSIRAANVMAASLRKAGKSVVVLNRKTFEREYPTIKQKKPDFILATDIAEMGANLCVERVLDCRTAFKPVLVDEGRKVAIKGPLRISASSAAQRRGRIGRNPNRDGDSYYYSEPTSENNAHHVCWLEASMLLDNMEVRGGMVAPLYGVEGTKTPVSPGEMRLRDDQRKVFRELVRNCDLPVWLSWQVAKAGLKTNDRKWCFEGPEEHEILNDSGETVKCRAPGGAKKPLRPRWCDERVSSDQSALSEFIKFAEGRRGAAEVLVVLSELPDFLAKKGGEAMDTISVFLHSEEGSRAYRNALSMMPEAMTIVMLFILAGLLTSGMVIFFMSPKGISRMSMAMGTMAGCGYLMFLGGVKPTHISYIMLIFFVLMVVVIPEPGQQRSIQDNQVAYLIIGILTLVSAVAANELGMLEKTKEDLFGKKNLIPSSASPWSWPDLDLKPGAAWTVYVGIVTMLSPMLHHWIKVEYGNLSLSGIAQSASVLSFMDKGIPFMKMNISVIMLLVSGWNSITVMPLLCGIGCAMLHWSLILPGIKAQQSKLAQRRVFHGVAKNPVVDGNPTVDIEEAPEMPALYEKKLALYLLLALSLASVAMCRTPFSLAEGIVLASAALGPLIEGNTSLLWNGPMAVSMTGVMRGNHYAFVGVMYNLWKMKTGRRGSANGKTLGEVWKRELNLLDKRQFELYKRTDIVEVDRDTARRHLAEGKVDTGVAVSRGTAKLRWFHERGYVKLEGRVIDLGCGRGGWCYYAAAQKEVSGVKGFTLGRDGHEKPMNVQSLGWNIITFKDKTDIHRLEPVKCDTLLCDIGESSSSSVTEGERTVRVLDTVEKWLACGVDNFCVKVLAPYMPDVLEKLELLQRRFGGTVIRNPLSRNSTHEMYYVSGARSNVTFTVNQTSRLLMRRMRRPTGKVTLEADVILPIGTRSVETDKGPLDKEAIEERVERIKSEYMTSWFYDNDNPYRTWHYCGSYVTKTSGSAASMVNGVIKILTYPWDRIEEVTRMAMTDTTPFGQQRVFKEKVDTRAKDPPAGTRKIMKVVNRWLFRHLAREKNPRLCTKEEFIAKVRSHAAIGAYLEEQEQWKTANEAVQDPKFWELVDEERKLHQQGRCRTCVYNMMGKREKKLSEFGKAKGSRAIWYMWLGARYLEFEALGFLNEDHWASRENSGGGVEGIGLQYLGYVIRDLAAMDGGGFYADDTAGWDTRITEADLDDEQEILNYMSPHHKKLAQAVMEMTYKNKVVKVLRPAPGGKAYMDVISRRDQRGSGQVVTYALNTITNLKVQLIRMAEAEMVIHHQHVQDCDESVLTRLEAWLTEHGCNRLKRMAVSGDDCVVRPIDDRFGLALSHLNAMSKVRKDISEWQPSKGWNDWENVPFCSHHFHELQLKDGRRIVVPCREQDELIGRGRVSPGNGWMIKETACLSKAYANMWSLMYFHKRDMRLLSLAVSSAVPTSWVPQGRTTWSIHGKGEWMTTEDMLEVWNRVWITNNPHMQDKTMVKKWRDVPYLTKRQDKLCGSLIGMTNRATWASHIHLVIHRIRTLIGQEKYTDYLTVMDRYSVDADLQLGELI

SEQ ID NO: 29 - DNA, 11655 bp, Artificial Sequence
  recombinant flavivirus
  CDS (96)..(11069)
agaagtttatctgtgtgaacttcttggcttagtatcgtagagaagaatcgagagattagtgcagtttaaacagttttttagaacggaagataaccatgactaaaaaaccaggagggcccggtaaaaaccgggctatcaatatgctgaaacgcggcctaccccgcgtattcccactagtgggagtgaagagggtagtaatggtcttcacactcgaagatttcgttggggactggcgacagacagccggctacaacctggaccaagtccttgaacagggaggtgtgtccagtttgtttcagaatctcggggtgtccgtaactccgatccaaaggattgtcctgagcggtgaaaatgggctgaagatcgacatccatgtcatcatcccgtatgaaggtctgagcggcgaccaaatgggccagatcgaaaaaatttttaaggtggtgtaccctgtggatgatcatcactttaaggtgatcctgcactatggcacactggtaatcgacggggttacgccgaacatgatcgactatttcggacggccgtatgaaggcatcgccgtgttcgacggcaaaaagatcactgtaacagggaccctgtggaacggcaacaaaattatcgacgagcgcctgatcaaccccgacggctccctgctgttccgagtaaccatcaacggagtgaccggctggcggctgtgcgaacgcattctggcgggaagcggagagggcagaggaagtctgctaacatgcggtgacgtcgaggagaatcctggacctatgacaaagaagcctggcggcccaggcaagaatagagccattaacatgttaaagagaggattgccaagagtgtttcctttggtcggggtcaaacgagtggtcatgagcttgttggacggcagagggccagtacgtttcgtgctggctcttatcacgttcttcaagtttacagcattagccccgaccaaggcgctttcaggccgatggaaagcagtggaaaagagtgtggcaatgaaacatcttactagtttcaaacgagaacttggaacactcattgacgccgtgaacaagcggggcagaaagcaaaacaaaagaggaggaaatgaaggctcaatcatgtggctcgcgagcttggcagttgtcatagcttgtgcaggagccatgaagttgtcgaatttccaggggaagcttttgatgaccatcaacaacacggacattgcagacgttatcgtgattcccacttcgaaaggagagaacagatgctgggtccgggcaatcgacgtcggctacatgtgtgaggacactatcacgtacgaatgtcctaagcttaccatgggcaatgatccagaggatgtggattgctggtgtgacaaccaagaagtctacgtccaatatggacggtgcacgcggaccaggcattccaagcgaagcaggagatccgtgtcggtccaaacacatggggagagttcactagtgaataaaaaagaggcttggctggattcaacgaaagccacacgatatctcatgaaaactgagaactggatcataaggaatcctggctatgctttcctggcggcggtacttggctggatgcttggcagtaacaacggtcaacgcgtggtatttaccatcctcctgctgttggtcgctccggcttacagttttaattgtctgggaatgggcaatcgtgacttcatagaaggagccagtggagccacttgggtggacttggtgctagaaggagacagctgcttgacaatcatggcaaacgacaaaccaacattggacgtccgcatgattagcatcgaagctagccaacttgctgaggtcagaagttactgctatcatgcttcagtcactgacatctcgacggtggctcggtgccccacgactggagaagcccacaacgagaagcgagctgatagtagctatgtgtgcaaacaaggcttcactgaccgtgggtggggcaacggatgtggatttttcgggaagggaagcattgacacatgtgcaaaattctcctgcaccagtaaagcgattgggagaacaatccagccagaaaacatcaaatacaaagttggcatttttgtgcatggaaccaccacttcggaaaaccatgggaattattcagcgcaagttggggcgtcccaggcggcaaagtttacagtaacacccaatgctccttcggtagccctcaaacttggtgactacggagaagtcacactggactgtgagccaaggagtggactgaacactgaagcgttttacgtcatgaccgtggggtcaaagtcatttctggtccatagggagtggtttcatgacctcgctctcccctggacgtccccttcgagcacagcgtggagaaacagagaactcctcatggaatttgaaggggcgcacgccacaaaacagtccgttgttgctcttgggtcacaggaaggaggcctccatcatgcgttggcaggagccatcgtggtggagtactcaagctcagtgaagttaacatcaggccacctgaaatgtaggctgaaaatggacaaactggctctgaaaggcacaacctatggcatgtgtacagaaaaattctcgttcgcgaaaaatccggtggacactggtcacggaacagttgtcattgaactctcctactctgggagtgatggcccctgcaaaattccgattgtttccgttgcgagcctcaatgacatgacccccgttgggcggctggtgacagtgaaccccttcgtcgcgacttccagtgccaactcaaaggtgctggtcgagatggaaccccccttcggagactcctacatcgtagttggaaggggagacaagcagatcaaccaccattggcacaaagctggaagcacgctgggcaaggccttttcaacaactttgaagggagctcaaagactggcagcgttgggcgacacagcctgggactttggctctattggaggggtcttcaactccataggaagagccgttcaccaagtgtttggtggtgccttcagaacactctttgggggaatgtcttggatcacacaagggctaatgggtgccctactgctctggatgggcgtcaacgcacgagaccgatcaattgctttggccttcttagccacaggaggtgtgctcgtgttcttagcgaccaatgtgcatgctgacactggatgtgccattgacatcacaagaaaagagatgagatgtggaagtggcatcttcgtgcacaacgacgtggaagcctgggtggataggtataaatatttgccagaaacgcccagatccctagcgaagatcgtccacaaagcgcacaaggaaggcgtgtgcggagtcagatctgtcactagactggagcaccaaatgtgggaagccgtaagggacgaattgaacgtcctgctcaaagagaatgcagtggacctcagtgtggttgtgaacaagcccgtgggaagatatcgctcagcccctaaacgcctatccatgacgcaagagaagtttgaaatgggctggaaagcatggggaaaaagcatcctctttgccccggaattggctaactccacatttgtcgtagatggacctgagacaaaggaatgccctgatgagcacagagcttggaacagcatgcaaatcgaagacttcggctttggcatcacatcaacccgtgtgtggctgaaaattagagaggagagcactgacgagtgtgatggagcgatcataggcacggctgtcaaaggacatgtggcagtccatagtgacttgtcgtactggattgagagtcgctacaacgacacatggaaacttgagagggcagtctttggagaggtcaaatcttgcacttggccagagacacacaccctttggggagatgatgttgaggaaagtgaactcatcattccgcacaccatagccggaccaaaaagcaagcacaatcggagggaagggtataagacacaaaaccagggaccttgggatgagaatggcatagtcttggactttgattattgcccagggacaaaagtcaccattacagaggattgtagcaagagaggcccttcggtcagaaccactactgacagtggaaagttgatcactgactggtgctgtcgcagttgctcccttccgcccctacgattccggacagaaaatggctgctggtacggaatggaaatcagacctgttatgcatgatgaaacaacactcgtcagatcacaggttcatgctttcaaaggtgaaatggttgacccttttcagctgggccttctggtgatgtttctggccacccaggaagtccttcgcaagaggtggacggccagattgaccattcctgcggttttgggggtcctacttgtgctgatgcttgggggtatcacttacactgatttggcgaggtatgtggtgctagtcgctgctgctttcgcagaggccaacagtggaggagacgtcctgcaccttgctttgattgctgtttttaagatccaaccagcatttttagtgatgaacatgcttagcacgagatggacgaaccaagaaaacgtggttctggtcctaggggctgcctttttccaattggcctcagtagatctgcaaataggagtccacggaatcctgaatgccgccgctatagcatggatgattgtccgagcgatcaccttccccacaacctcctccgtcaccatgccagtcttagcgcttctaactccggggatgagggctctatacctagacacttacagaatcatcctcctcgtcatagggatttgctccctgctgcacgagaggaaaaagaccatggcgaaaaagaaaggagctgtactcttgggcttagcgctcacatccactggatggttctcgcccaccactatagctgccggactaatggtctgcaacccaaacaagaagagagggtggccagctactgagtttttgtcggcagttggattgatgtttgccatcgtaggtggtttggccgagttggatattgaatccatgtcaatacccttcatgctggcaggtctcatggcagtgtcctacgtggtgtcaggaaaagcaacagatatgtggcttgaacgggccgccgacatcagctgggatatgggtgctgcaatcacaggaagcagtcggaggctggatgtgaaactggatgatgacggagattttcacttgattgatgatcccggtgttccatggaaggtctgggtcctgcgcatgtcttgcattggcttagccgccctcacgccttgggccatcgttcccgccgctttcggttattggctcactttaaaaacaacaaaaagagggggcgtgttttgggacacgccatccccaaaaccttgctcaaaaggagacaccactacaggagtctaccgaattatggctagagggattcttggcacttaccaggccggcgtcggagtcatgtacgagaatgttttccacacactatggcacacaactagaggagcagccattgtgagtggagaaggaaaattgacgccatactggggtagtgtgaaagaagaccgcatagcttacggaggcccatggaggtttgaccgaaaatggaatggaacagatgacgtgcaagtgatcgtggtagaaccggggaagggcgcagtaaacatccagacaaaaccaggagtgtttcggactcccttcggggaggttggggctgttagtctggattacccgcgaggaacatccggctcacccattctggattccaatggagacattataggcctatacggcaatggagttgagcttggcgatggctcatacgtcagcgccatcgtgcagggtgaccgtcaggaggaaccagtcccagaagcttacaccccaaacatgttgagaaagagacagatgactgtgctagatttgcaccctggttcagggaaaaccaggaaaattctgccacaaataattaaggacgctatccagcagcgcctaagaacagctgtgttggcaccgacgcgggtggtagcagcagaaatggcagaagttttgagagggctcccagtacgatatcaaacttcagcagtgcagagagagcaccaagggaatgaaatagtggatgtgatgtgccacgccactctgacccatagactgatgtcaccgaacagagtgcccaactacaacctatttgtcatggatgaagctcatttcaccgacccagccagtatagccgcacgaggatacattgctaccaaggtggaattaggggaggcagcagccatctttatgacagcgaccccgcctggaaccacggatccttttcctgactcaaatgccccaatccatgatttgcaagatgagataccagacagggcatggagcagtggatacgaatggatcacagaatatgcgggtaaaaccgtgtggtttgtggcgagcgtaaaaatggggaatgagattgcaatgtgcctccaaagagcggggaaaaaggtcatccaactcaaccgcaagtcctatgacacagaatacccaaaatgtaagaatggagactgggattttgtcattaccaccgacatctctgaaatgggggccaacttcggtgcgagcagggtcatcgactgtagaaagagcgtgaaacccaccatcttagaagagggagaaggcagagtcatcctcggaaacccatctcccataaccagtgcaagcgcagctcaacggaggggcagagtaggcagaaaccccaatcaagttggagatgaataccactatgggggggctaccagtgaagatgacagtaacctagcccattggacagaggcaaagatcatgttagacaacatacacatgcccaatggactggtggcccagctctatggaccagagagggaaaaggctttcacaatggatggcgaataccgtctcagaggtgaagaaaagaaaaacttcttagagctgcttaggacggctgacctcccggtgtggctggcctacaaggtggcgtccaatggcattcagtacaccgacagaaagtggtgttttgatgggccgcgtacgaatgccatactggaggacaacaccgaggtagagatagtcacccggatgggtgagaggaaaatcctcaagccgagatggcttgatgcaagagtttatgcagatcaccaggccctcaagtggttcaaagactttgcagcagggaagagatcagccgttagcttcatagaggtgctcggtcgcatgcctgagcatttcatgggaaagacgcgggaagctttagacaccatgtacttggttgcaacggctgagaaaggtgggaaagcacaccgaatggctctcgaagagctgccagatgcactggaaaccatcacacttattgtcgccattactgtgatgacaggaggattcttcctactaatgatgcagcgaaagggtatagggaagatgggtcttggagctctagtgctcacactagctaccttcttcctgtgggcggcagaggttcctggaaccaaaatagcagggaccctgctgatcgccctgctgctgatggtggttctcatcccagaaccggaaaaacagaggtcacagacagataaccaactggcggtgtttctcatctgtgtcttgaccgtggttggagtggtggcagcaaacgagtacgggatgctagaaaaaaccaaagcggatctcaagagcatgtttggcggaaagacgcaggcatcaggactgactggattgccaagcatggcactggacctgcgtccagccacagcctgggcactgtatggggggagcacagtcgtgctaacccctcttctgaagcacctgatcacgtcggaatacgtcaccacatcgctagcttcaattaactcacaagctggctcattattcgtcttgccacgaggcgtgccttttaccgacctagacttgactgttggcctcgtcttccttggctgttggggtcaagtcaccctcacaacgtttctgacagccatggttctggcgacacttcactatgggtacatgctccctggttggcaagcagaagcactcagggctgcccagagaaggacagcggctggaataatgaagaatgccgttgttgacggaatggtcgccactgatgtgcctgaactggaaaggactactcctctgatgcaaaagaaagtcggacaggtgctcctcataggggtaagcgtggcagcgttcctcgtcaaccctaatgtcaccactgtgagagaagcaggggtgttggtgacggcggctacgcttactttgtgggacaatggagccagtgccgtttggaattccaccacagccacgggactctgccatgtcatgcgaggtagctacctggctggaggctccattgcttggactctcatcaagaacgctaataagccctccttgaaaaggggaaggcctgggggcaggacgctaggggagcagtggaaggaaaaactaaatgccatgagtagagaagagttttttaaataccggagagaggccataatcgaggtggaccgcactgaagcacgcagggccagacgtgaaaataacatagtgggaggacatccggtttcgcgaggctcagcaaaactccgttggctcgtggagaaaggatttgtctcgccaataggaaaagtcattgatctagggtgtgggcgtggaggatggagctactacgcagcaaccctgaagaaggtccaggaagtcagaggatacacgaaaggtggggcgggacatgaagaaccgatgctcatgcagagctacggctggaacctggtctccctgaagagtggagtggacgtgttttacaaaccttcagagcccagtgataccctgttctgtgacataggggaatcctccccaagtccagaagtagaagaacaacgcacactacgcgtcctagagatgacatctgactggttgcaccgaggacctagagagttctgcattaaagttctctgcccttacatgcccaaggttatagaaaaaatggaagttctgcagcgtcgcttcggaggtgggctagtgcgtctccccctgtcccgaaactccaatcacgagatgtattgggttagtggagccgctggcaatgtggtgcacgctgtgaacatgaccagccaggtattactggggcgaatggatcgcacagtgtggagagggccaaagtatgaggaagatgtcaacctagggagcggaacaagagccgtgggaaagggagaagtccatagcaatcaggagaaaatcaagaagagaatccagaagcttaaagaagaattcgccacaacgtggcacaaagaccctgagcatccataccgcacttggacataccacggaagctatgaagtgaaggctactggctcagccagctctctcgtcaacggagtggtgaagctcatgagcaaaccttgggacgccattgccaacgtcaccaccatggccatgactgacaccaccccttttggacagcaaagagttttcaaggagaaagttgacacgaaggctcctgagccaccagctggagccaaggaagtgctcaacgagaccaccaactggctgtgggcctacttgtcacgggaaaaaagaccccgcttgtgcaccaaggaagaattcattaagaaagttaacagcaacgcggctcttggagcagtgttcgctgaacagaatcaatggagcacggcgcgtgaggctgtggatgacccgcggttttgggagatggttgatgaagagagggaaaaccatctgcgaggagagtgtcacacatgtatctacaacatgatgggaaaaagagagaagaagcctggagagtttggaaaagctaaaggaagcagggccatttggttcatgtggcttggagcacggtatctagagtttgaagctttggggttcctgaatgaagaccattggctgagccgagagaattcaggaggtggagtggaaggctcaggcgtccaaaagctgggatacatcctccgtgacatagcaggaaagcaaggagggaaaatgtacgctgatgataccgccgggtgggacactagaattaccagaactgatttagaaaatgaagctaaggtactggagctcctagacggtgaacaccgcatgctcgcccgagccataattgaactgacttacaggcacaaagtggtcaaggtcatgagacctgcagcagaaggaaagaccgtgatggacgtgatatcaagagaagatcaaagggggagtggacaggtggtcacttatgctcttaacactttcacgaacatcgctgtccagctcgtcaggctgatggaggctgagggggtcattggaccacaacacttggaacatctacctaggaaaaacaagatagctgtcaggacctggctctttgagaatggagaggagagagtgaccaggatggcgatcagcggagacgactgtgccgtcaaaccgctggacgacagattcgccacagccctccacttcctcaacgcaatgtcaaaggtcagaaaagacatccaggaatggaagccttcgcatggctggcacgattggcagcaagttcccttctgttctaaccattttcaggagattgtgatgaaagatggaaggagtatagttgtcccgtgcagaggacaggatgagctgataggcagggctcgcatctctccaggagctggatggaatgtgaaggacacagcttgcctggccaaagcatatgcacagatgtggctactcctatacttccatcgcagggacttgcgtctcatggcaaatgcgatttgctcagcagtgccagtagattgggtgcccacaggcaggacatcctggtcaatacactcgaaaggagagtggatgaccacggaagacatgctgcaggtctggaacagagtttggattgaagaaaatgaatggatgatggacaagactccaatcacaagctggacagacgttccgtatgtgggaaagcgcgaggacatctggtgtggcagcctcatcggaacgcgatccagagcaacctgggctgagaacatctatgcggcgataaaccaggttagagctgtcattgggaaagaaaattatgttgactacatgacctcactcaggagatacgaagacgtcttgatccaggaagacagggtcatctagtgtgatttaaggtagaaaagtagactatgtaaacaatgtaaatgagaaaatgcatgcatatggagtcaggccagcaaaagctgccaccggatactgggtagacggtgctgcctgcgtctcagtcccaggaggactgggttaacaaatctgacaacagaaagtgagaaagccctcagaaccgtctcggaagtaggtccctgctcactggaagttgaaagaccaacgtcaggccacaaatttgtgccactccgctagggagtgcggcctgcgcagccccaggaggactgggttaccaaagccgttgaggcccccacggcccaagcctcgtctaggatgcaatagacgaggtgtaaggactagaggttagaggagaccccgtggaaacaacaacatgcggcccaagccccctcgaagctgtagaggaggtggaaggactagaggttagaggagaccccgcatttgcatcaaacagcatattgacacctgggaatagactgggagatcttctgctctatctcaacatcagctactaggcacagagcgccgaagtatgtagctggtggtgaggaagaacacaggatct

SEQ ID NO: 30 - protein, 3658 aa, Artificial Sequence
  Synthetic Construct
MTKKPGGPGKNRAINMLKRGLPRVFPLVGVKRVVMVFTLEDFVGDWRQTAGYNLDQVLEQGGVSSLFQNLGVSVTPIQRIVLSGENGLKIDIHVIIPYEGLSGDQMGQIEKIFKVVYPVDDHHFKVILHYGTLVIDGVTPNMIDYFGRPYEGIAVFDGKKITVTGTLWNGNKIIDERLINPDGSLLFRVTINGVTGWRLCERILAGSGEGRGSLLTCGDVEENPGPMTKKPGGPGKNRAINMLKRGLPRVFPLVGVKRVVMSLLDGRGPVRFVLALITFFKFTALAPTKALSGRWKAVEKSVAMKHLTSFKRELGTLIDAVNKRGRKQNKRGGNEGSIMWLASLAVVIACAGAMKLSNFQGKLLMTINNTDIADVIVIPTSKGENRCWVRAIDVGYMCEDTITYECPKLTMGNDPEDVDCWCDNQEVYVQYGRCTRTRHSKRSRRSVSVQTHGESSLVNKKEAWLDSTKATRYLMKTENWIIRNPGYAFLAAVLGWMLGSNNGQRVVFTILLLLVAPAYSFNCLGMGNRDFIEGASGATWVDLVLEGDSCLTIMANDKPTLDVRMISIEASQLAEVRSYCYHASVTDISTVARCPTTGEAHNEKRADSSYVCKQGFTDRGWGNGCGFFGKGSIDTCAKFSCTSKAIGRTIQPENIKYKVGIFVHGTTTSENHGNYSAQVGASQAAKFTVTPNAPSVALKLGDYGEVTLDCEPRSGLNTEAFYVMTVGSKSFLVHREWFHDLALPWTSPSSTAWRNRELLMEFEGAHATKQSVVALGSQEGGLHHALAGAIVVEYSSSVKLTSGHLKCRLKMDKLALKGTTYGMCTEKFSFAKNPVDTGHGTVVIELSYSGSDGPCKIPIVSVASLNDMTPVGRLVTVNPFVATSSANSKVLVEMEPPFGDSYIVVGRGDKQINHHWHKAGSTLGKAFSTTLKGAQRLAALGDTAWDFGSIGGVFNSIGRAVHQVFGGAFRTLFGGMSWITQGLMGALLLWMGVNARDRSIALAFLATGGVLVFLATNVHADTGCAIDITRKEMRCGSGIFVHNDVEAWVDRYKYLPETPRSLAKIVHKAHKEGVCGVRSVTRLEHQMWEAVRDELNVLLKENAVDLSVVVNKPVGRYRSAPKRLSMTQEKFEMGWKAWGKSILFAPELANSTFVVDGPETKECPDEHRAWNSMQIEDFGFGITSTRVWLKIREESTDECDGAIIGTAVKGHVAVHSDLSYWIESRYNDTWKLERAVFGEVKSCTWPETHTLWGDDVEESELIIPHTIAGPKSKHNRREGYKTQNQGPWDENGIVLDFDYCPGTKVTITEDCSKRGPSVRTTTDSGKLITDWCCRSCSLPPLRFRTENGCWYGMEIRPVMHDETTLVRSQVHAFKGEMVDPFQLGLLVMFLATQEVLRKRWTARLTIPAVLGVLLVLMLGGITYTDLARYVVLVAAAFAEANSGGDVLHLALIAVFKIQPAFLVMNMLSTRWTNQENVVLVLGAAFFQLASVDLQIGVHGILNAAAIAWMIVRAITFPTTSSVTMPVLALLTPGMRALYLDTYRIILLVIGICSLLHERKKTMAKKKGAVLLGLALTSTGWFSPTTIAAGLMVCNPNKKRGWPATEFLSAVGLMFAIVGGLAELDIESMSIPFMLAGLMAVSYVVSGKATDMWLERAADISWDMGAAITGSSRRLDVKLDDDGDFHLIDDPGVPWKVWVLRMSCIGLAALTPWAIVPAAFGYWLTLKTTKRGGVFWDTPSPKPCSKGDTTTGVYRIMARGILGTYQAGVGVMYENVFHTLWHTTRGAAIVSGEGKLTPYWGSVKEDRIAYGGPWRFDRKWNGTDDVQVIVVEPGKGAVNIQTKPGVFRTPFGEVGAVSLDYPRGTSGSPILDSNGDIIGLYGNGVELGDGSYVSAIVQGDRQEEPVPEAYTPNMLRKRQMTVLDLHPGSGKTRKILPQIIKDAIQQRLRTAVLAPTRVVAAEMAEVLRGLPVRYQTSAVQREHQGNEIVDVMCHATLTHRLMSPNRVPNYNLFVMDEAHFTDPASIAARGYIATKVELGEAAAIFMTATPPGTTDPFPDSNAPIHDLQDEIPDRAWSSGYEWITEYAGKTVWFVASVKMGNEIAMCLQRAGKKVIQLNRKSYDTEYPKCKNGDWDFVITTDISEMGANFGASRVIDCRKSVKPTILEEGEGRVILGNPSPITSASAAQRRGRVGRNPNQVGDEYHYGGATSEDDSNLAHWTEAKIMLDNIHMPNGLVAQLYGPEREKAFTMDGEYRLRGEEKKNFLELLRTADLPVWLAYKVASNGIQYTDRKWCFDGPRTNAILEDNTEVEIVTRMGERKILKPRWLDARVYADHQALKWFKDFAAGKRSAVSFIEVLGRMPEHFMGKTREALDTMYLVATAEKGGKAHRMALEELPDALETITLIVAITVMTGGFFLLMMQRKGIGKMGLGALVLTLATFFLWAAEVPGTKIAGTLLIALLLMVVLIPEPEKQRSQTDNQLAVFLICVLTVVGVVAANEYGMLEKTKADLKSMFGGKTQASGLTGLPSMALDLRPATAWALYGGSTVVLTPLLKHLITSEYVTTSLASINSQAGSLFVLPRGVPFTDLDLTVGLVFLGCWGQVTLTTFLTAMVLATLHYGYMLPGWQAEALRAAQRRTAAGIMKNAVVDGMVATDVPELERTTPLMQKKVGQVLLIGVSVAAFLVNPNVTTVREAGVLVTAATLTLWDNGASAVWNSTTATGLCHVMRGSYLAGGSIAWTLIKNANKPSLKRGRPGGRTLGEQWKEKLNAMSREEFFKYRREAIIEVDRTEARRARRENNIVGGHPVSRGSAKLRWLVEKGFVSPIGKVIDLGCGRGGWSYYAATLKKVQEVRGYTKGGAGHEEPMLMQSYGWNLVSLKSGVDVFYKPSEPSDTLFCDIGESSPSPEVEEQRTLRVLEMTSDWLHRGPREFCIKVLCPYMPKVIEKMEVLQRRFGGGLVRLPLSRNSNHEMYWVSGAAGNVVHAVNMTSQVLLGRMDRTVWRGPKYEEDVNLGSGTRAVGKGEVHSNQEKIKKRIQKLKEEFATTWHKDPEHPYRTWTYHGSYEVKATGSASSLVNGVVKLMSKPWDAIANVTTMAMTDTTPFGQQRVFKEKVDTKAPEPPAGAKEVLNETTNWLWAYLSREKRPRLCTKEEFIKKVNSNAALGAVFAEQNQWSTAREAVDDPRFWEMVDEERENHLRGECHTCIYNMMGKREKKPGEFGKAKGSRAIWFMWLGARYLEFEALGFLNEDHWLSRENSGGGVEGSGVQKLGYILRDIAGKQGGKMYADDTAGWDTRITRTDLENEAKVLELLDGEHRMLARAIIELTYRHKVVKVMRPAAEGKTVMDVISREDQRGSGQVVTYALNTFTNIAVQLVRLMEAEGVIGPQHLEHLPRKNKIAVRTWLFENGEERVTRMAISGDDCAVKPLDDRFATALHFLNAMSKVRKDIQEWKPSHGWHDWQQVPFCSNHFQEIVMKDGRSIVVPCRGQDELIGRARISPGAGWNVKDTACLAKAYAQMWLLLYFHRRDLRLMANAICSAVPVDWVPTGRTSWSIHSKGEWMTTEDMLQVWNRVWIEENEWMMDKTPITSWTDVPYVGKREDIWCGSLIGTRSRATWAENIYAAINQVRAVIGKENYVDYMTSLRRYEDVLIQEDRVI

SEQ ID NO: 31 - DNA, 11704 bp, Artificial Sequence
  recombinant flavivirus
  CDS (97)..(11070)
agtagttcgcctgtgtgagctgacaaacttagtagtgtttgtgaggattaacaacaattaacacagtgcgagctgtttcttagcacgaagatctcgatgtctaagaaaccaggagggcccggcaagagccgggctgtcaatatgctaaaacgcggaatgccccgcgtgttgtccttgattggactgaagagggctatggtcttcacactcgaagatttcgttggggactggcgacagacagccggctacaacctggaccaagtccttgaacagggaggtgtgtccagtttgtttcagaatctcggggtgtccgtaactccgatccaaaggattgtcctgagcggtgaaaatgggctgaagatcgacatccatgtcatcatcccgtatgaaggtctgagcggcgaccaaatgggccagatcgaaaaaatttttaaggtggtgtaccctgtggatgatcatcactttaaggtgatcctgcactatggcacactggtaatcgacggggttacgccgaacatgatcgactatttcggacggccgtatgaaggcatcgccgtgttcgacggcaaaaagatcactgtaacagggaccctgtggaacggcaacaaaattatcgacgagcgcctgatcaaccccgacggctccctgctgttccgagtaaccatcaacggagtgaccggctggcggctgtgcgaacgcattctggcgggaagcggagagggcagaggaagtctgctaacatgcggtgacgtcgaggagaatcctggacctatgagcaaaaagcccggcggaccaggaaaatcaagagccgtgaacatgttgaagagaggcatgccaagagtcctcagtctcatcggcttaaaacgcgccatgttgagcctgatcgacggcaaggggccaatacgatttgtgttggctctcttggcgttcttcaggttcacagcaattgctccgacccgagcagtgctggatcgatggagaggtgtgaacaaacaaacagcgatgaaacaccttctgagttttaagaaggaactagggaccttgaccagtgctatcaatcggcggagctcaaaacaaaagaaaagaggaggaaagaccggaattgcagtcatgattggcctgatcgccagcgtaggagcagttaccctctctaacttccaagggaaggtgatgatgacggtaaatgctactgacgtcacagatgtcatcacgattccaacagctgctggaaagaacctatgcattgtcagagcaatggatgtgggatacatgtgcgatgatactatcacttatgaatgcccagtgctgtcggctggtaatgatccagaagacatcgactgttggtgcacaaagtcagcagtctacgtcaggtatggaagatgcaccaagacacgccactcaagacgcagtcggaggtcactgacagtgcagacacacggagaaagcactctagcgaacaagaagggggcttggatggacagcaccaaggccacaaggtatttggtaaaaacagaatcatggatcttgaggaaccctggatatgccctggtggcagccgtcattggttggatgcttgggagcaacaccatgcagagagttgtgtttgtcgtgctattgcttttggtggccccagcttacagcttcaactgccttggaatgagcaacagagacttcttggaaggagtgtctggagcaacatgggtggatttggttctcgaaggcgacagctgcgtgactatcatgtctaaggacaagcctaccatcgatgtgaagatgatgaatatggaggcggccaacctggcagaggtccgcagttattgctatttggctaccgtcagcgatctctccaccaaagctgcgtgcccgaccatgggagaagctcacaatgacaaacgtgctgacccagcttttgtgtgcagacaaggagtggtggacaggggctggggcaacggctgcggactatttggcaaaggaagcattgacacatgcgccaaatttgcctgctctaccaaggcaataggaagaaccatcttgaaagagaatatcaagtacgaagtggccatttttgtccatggaccaactactgtggagtcgcacggaaactactccacacaggttggagccactcaggcagggagattcagcatcactcctgcggcgccttcatacacactaaagcttggagaatatggagaggtgacagtggactgtgaaccacggtcagggattgacaccaatgcatactacgtgatgactgttggaacaaagacgttcttggtccatcgtgagtggttcatggacctcaacctcccttggagcagtgctggaagtactgtgtggaggaacagagagacgttaatggagtttgaggaaccacacgccacgaagcagtctgtgatagcattgggctcacaagagggagctctgcatcaagctttggctggagccattcctgtggaattttcaagcaacactgtcaagttgacgtcgggtcatttgaagtgtagagtgaagatggaaaaattgcagttgaagggaacaacctatggcgtctgttcaaaggctttcaagtttcttgggactcccgcagacacaggtcacggcactgtggtgttggaattgcagtacactggcacggatggaccttgtaaagttcctatctcgtcagtggcttcattgaacgacctaacgccagtgggcagattggtcactgtcaacccttttgtttcagtggccacggccaacgctaaggtcctgattgaattggaaccaccctttggagactcatacatagtggtgggcagaggagaacaacagatcaatcaccattggcacaagtctggaagcagcattggcaaagcctttacaaccaccctcaaaggagcgcagagactagccgctctaggagacacagcttgggactttggatcagttggaggggtgttcacctcagttgggaaggctgtccatcaagtgttcggaggagcattccgcttactgttcggaggcatgtcctggataacgcaaggattgctgggggctctcctgttgtggatgggcatcaatgctcgtgataggtccatagctctcacgtttctcgcagttggaggagttctgctcttcctctccgtgaacgtgcacgctgacactgggtgtgccatagacatcagccggcaagagctgagatgtggaagtggagtgttcatacacaatgatgtggaggcttggatggaccgatacaagtattaccctgaaacgccacaaggcctagccaagatcattcagaaagctcataaggaaggagtgtgcggtctacgatcagtttccagactggagcatcaaatgtgggaagcagtgaaggacgagctgaacactcttttgaaggagaatggtgtggaccttagtgtcgtggttgagaaacaggagggaatgtacaagtcagcacctaaacgcctcaccgccaccacggaaaaattggaaattggctggaaggcctggggaaagagtattttatttgcaccagaactcgccaacaacacctttgtggttgatggtccggagaccaaggaatgtccgactcagaatcgcgcttggaatagcttagaagtggaggattttggatttggtctcaccagcactcggatgttcctgaaggtcagagagagcaacacaactgaatgtgactcgaagatcattggaacggctgtcaagaacaacttggcgatccacagtgacctgtcctattggattgaaagcaggctcaatgatacgtggaagcttgaaagggcagttctgggtgaagtcaaatcatgtacgtggcctgagacgcataccttgtggggcgatggaatccttgagagtgacttgataataccagtcacactggcgggaccacgaagcaatcacaatcggagacctgggtacaagacacaaaaccagggcccatgggacgaaggccgggtagagattgacttcgattactgcccaggaactacggtcaccctgagtgagagctgcggacaccgtggacctgccactcgcaccaccacagagagcggaaagttgataacagattggtgctgcaggagctgcaccttaccaccactgcgctaccaaactgacagcggctgttggtatggtatggagatcagaccacagagacatgatgaaaagaccctcgtgcagtcacaagtgaatgcttataatgctgatatgattgacccttttcagttgggccttctggtcgtgttcttggccacccaggaggtccttcgcaagaggtggacagccaagatcagcatgccagctatactgattgctctgctagtcctggtgtttgggggcattacttacactgatgtgttacgctatgtcatcttggtgggggcagctttcgcagaatctaattcgggaggagacgtggtacacttggcgctcatggcgaccttcaagatacaaccagtgtttatggtggcatcgtttctcaaagcgagatggaccaaccaggagaacatcttgttgatgttggcggctgttttctttcaaatggcttatcacgatgcccgccaaattctgctctgggagatccctgatgtgttgaattcactggcggtagcttggatgatactgagagccataacattcacaacgacatcaaacgtggttgttccgctgctagccctgctaacacccgggctgagatgcttgaatctggatgtgtacaggatactgctgttgatggtcggaataggcagcttgatcagggagaagaggagtgcagctgcaaaaaagaaaggagcaagtctgctatgcttggctctagcctcaacaggacttttcaaccccatgatccttgctgctggactgattacatgtgatcccaaccgtaaacgcggatggcccgcaactgaagtgatgacagctgtcggcctgatgtttgccatcgtcggagggctggcagagcttgacattgactccatggccattccaatgactatcgcggggctcatgtttgctgctttcgtgatttctgggaaatcaacagatatgtggattgagagaacggcggacatttcctgggaaagtgatgcagaaattacaggctcgagcgaaagagttgatgtgcggcttgatgatgatggaaacttccagctcatgaatgatccaggagcaccttggaagatatggatgctcagaatggtctgtctcgcgattagtgcgtacaccccctgggcaatcttgccctcagtagttggattttggataactctccaatacacaaagagaggaggcgtgttgtgggacactccctcaccaaaggagtacaaaaagggggacacgaccaccggcgtctacaggatcatgactcgtgggctgctcggcagttatcaagcaggagcgggcgtgatggttgaaggtgttttccacaccctttggcatacaacaaaaggagccgctttgatgagcggagagggccgcctggacccatactggggcagtgtcaaggaggatcgactttgttacggaggaccctggaaattgcagcacaagtggaacgggcaggatgaggtgcagatgattgtggtggaacctggcaagaacgttaagaacgtccagacgaaaccaggggtgttcaaaacacctgaaggagaaatcggggccgtgactttggacttccccactggaacatcaggctcaccaatagtggacaaaaacggtgatgtgattgggctttatggcaatggagtcataatgcccaacggctcatacataagcgcgatagtgcagggtgaaaggatggatgagccaatcccagccggattcgaacctgagatgctgaggaaaaaacagatcactgtactggatctccatcccggcgccggtaaaacaaggaggattctgccacagatcatcaaagaggccataaacagaagactgagaacagccgtgctagcaccaaccagggttgtggctgctgagatggctgaagcactgagaggactgcccatccggtaccagacatccgcagtgcccagagaacataatggaaatgagattgttgatgtcatgtgtcatgctaccctcacccacaggctgatgtctcctcacagggtgccgaactacaacctgttcgtgatggatgaggctcatttcaccgacccagctagcattgcagcaagaggttacatttccacaaaggtcgagctaggggaggcggcggcaatattcatgacagccaccccaccaggcacttcagatccattcccagagtccaattcaccaatttccgacttacagactgagatcccggatcgagcttggaactctggatacgaatggatcacagaatacaccgggaagacggtttggtttgtgcctagtgtcaagatggggaatgagattgccctttgcctacaacgtgctggaaagaaagtagtccaattgaacagaaagtcgtacgagacggagtacccaaaatgtaagaacgatgattgggactttgttatcacaacagacatatctgaaatgggggctaactttaaggcgagcagggtgattgacagccggaagagtgtgaaaccaaccatcataacagaaggagaagggagagtgatcctgggagaaccatctgcagtgacagcagctagtgccgcccagagacgtggacgtatcggtagaaatccgtcgcaagttggtgatgagtactgttatggggggcacacgaatgaagacgactcgaacttcgcccattggactgaggcacgaatcatgctggacaacatcaacatgccaaacggactgatcgctcaattctaccaaccagagcgtgagaaggtatataccatggatggggaataccggctcagaggagaagagagaaaaaactttctggaactgttgaggactgcagatctgccagtttggctggcttacaaggttgcagcggctggagtgtcataccacgaccggaggtggtgctttgatggtcctaggacaaacacaattttagaagacaacaacgaagtggaagtcatcacgaagcttggtgaaaggaagattctgaggccgcgctggattgacgccagggtgtactcggatcaccaggcactaaaggcgttcaaggacttcgcctcgggaaaacgttctcagatagggctcattgaggttctgggaaagatgcctgagcacttcatggggaagacatgggaagcacttgacaccatgtacgttgtggccactgcagagaaaggaggaagagctcacagaatggccctggaggaactgccagatgctcttcagacaattgccttgattgccttattgagtgtgatgaccatgggagtattcttcctcctcatgcagcggaagggcattggaaagataggtttgggaggcgctgtcttgggagtcgcgacctttttctgttggatggctgaagttccaggaacgaagatcgccggaatgttgctgctctcccttctcttgatgattgtgctaattcctgagccagagaagcaacgttcgcagacagacaaccagctagccgtgttcctgatttgtgtcatgacccttgtgagcgcagtggcagccaacgagatgggttggctagataagaccaagagtgacataagcagtttgtttgggcaaagaattgaggtcaaggagaatttcagcatgggagagtttcttttggacttgaggccggcaacagcctggtcactgtacgctgtgacaacagcggtcctcactccactgctaaagcatttgatcacgtcagattacatcaacacctcattgacctcaataaacgttcaggcaagtgcactattcacactcgcgcgaggcttccccttcgtcgatgttggagtgtcggctctcctgctagcagccggatgctggggacaagtcaccctcaccgttacggtaacagcggcaacactccttttttgccactatgcctacatggttcccggttggcaagctgaggcaatgcgctcagcccagcggcggacagcggccggaatcatgaagaacgctgtagtggatggcatcgtggccacggacgtcccagaattagagcgcaccacacccatcatgcagaagaaagttggacagatcatgctgatcttggtgtctctagctgcagtagtagtgaacccgtctgtgaagacagtacgagaagccggaattttgatcacggccgcagcggtgacgctttgggagaatggagcaagctctgtttggaacgcaacaactgccatcggactctgccacatcatgcgtgggggttggttgtcatgtctatccataacatggacactcataaagaacatggaaaaaccaggactaaaaagaggtggggcaaaaggacgcaccttgggagaggtttggaaagaaagactcaaccagatgacaaaagaagagttcactaggtaccgcaaagaggccatcatcgaagtcgatcgctcagcagcaaaacacgccaggaaagaaggcaatgccactggagggcatccagtctctaggggcacagcaaaactgagatggctggtcgaacggaggtttctcgaaccggtcggaaaagtgattgaccttggatgtggaagaggcggttggtgttactatatggcaacccaaaaaagagtccaagaagtcagagggtacacaaagggcggtcccggacatgaagagccccaactagtgcaaagttatggatggaacattgtcaccatgaagagtggagtggatgtgttctacagaccttctgagtgttgtgacaccctcctttgtgacatcggagagtcctcgtcaagtgctgaggttgaagagcataggacgattcgggtccttgaaatggttgaggactggctgcaccgagggccaagggaattttgcgtgaaggtgctctgcccctacatgccgaaagtcatagagaagatggagctgctccaacgccggtatggggggggactggtcagaaacccactctcacggaattccacgcacgctatgtattgggtgagtcgagcttcaggcaatgtggtacattcagtgaatatgaccagccaggtgctcctaggaagaatggaaaaaaggacctggaagggaccccaatacgaggaagatgtaaacttgggaagtggaaccagggcggtgggaaaacccctgctcaactcagacaccagtaaaatcaagaacaggattgaacgactcaggcgtgagtacagttcgacgtggcaccacgatgagaaccacccatatagaacctggaactatcacggcagttatgatgtgaagcccacaggctccgccagttcgctggtcaatggagtggtcaggctcctctcaaaaccatgggacaccatcacgaatgttaccaccatggccatgactgacactactcccttcgggcagcagcgagtgttcaaagagaaggtggacacgaaagctcctgaaccgccagaaggagtgaagtacgtgctcaacgagaccaccaactggttgtgggcgtttttggccagagaaaaacgtccaaggatgtgctctcgagaggagttcataagaaaggtcaacagcaatgcagctttgggtgccatgtttgaagagcagaatcaatggaggagcgccagagaggcagttgaagatccaaaattttgggagatggtggatgaggagcgcgaggcacatctgcggggggaatgtcacacttgcatttacaacatgatgggaaagagagagaaaaaacccggagagttcggaaaggccaagggaagcagagccatttggttcatgtggcttggagctcgctttctggagttcgaggctctgggttttctcaatgaagaccactggcttggaagaaagaactcaggaggaggtgtcgagggcttgggcctccaaaaactgggttacatcctgcgtgaagttggcacccggcctgggggcaagatctatgctgatgacacagctggctgggacacccgcatcacgagagctgacttggaaaatgaagctaaggtgcttgagctgcttgatggggaacatcggcgtcttgccagggccatcattgagctcacctatcgtcacaaagttgtgaaagtgatgcgcccggctgctgatggaagaaccgtcatggatgttatctccagagaagatcagagggggagtggacaagttgtcacctacgccctaaacactttcaccaacctggccgtccagctggtgaggatgatggaaggggaaggagtgattggcccagatgatgtggagaaactcacaaaagggaaaggacccaaagtcaggacctggctgtttgagaatggggaagaaagactcagccgcatggctgtcagtggagatgactgtgtggtaaagcccctggacgatcgctttgccacctcgctccacttcctcaatgctatgtcaaaggttcgcaaagacatccaagagtggaaaccgtcaactggatggtatgattggcagcaggttccattttgctcaaaccatttcactgaattgatcatgaaagatggaagaacactggtggttccatgccgaggacaggatgaattggtaggcagagctcgcatatctccaggggccggatggaacgtccgcgacactgcttgtctggctaagtcttatgcccagatgtggctgcttctgtacttccacagaagagacctgcggctcatggccaacgccatttgctccgctgtccctgtgaattgggtccctaccggaagaaccacgtggtccatccatgcaggaggagagtggatgacaacagaggacatgttggaggtctggaaccgtgtttggatagaggagaatgaatggatggaagacaaaaccccagtggagaaatggagtgacgtcccatattcaggaaaacgagaggacatctggtgtggcagcctgattggcacaagagcccgagccacgtgggcagaaaacatccaggtggctatcaaccaagtcagagcaatcatcggagatgagaagtatgtggattacatgagttcactaaagagatatgaagacacaactttggttgaggacacagtactgtagatatttaatcaattgtaaatagacaatataagtatgcataaaagtgtagttttatagtagtatttagtggtgttagtgtaaatagttaagaaaattttgaggagaaagtcaggccgggaagttcccgccaccggaagttgagtagacggtgctgcctgcgactcaaccccaggaggactgggtgaacaaagccgcgaagtgatccatgtaagccttcagaaccgtctcggaaggaggaccccacatgttgtaacttcaaagcccaatgtcagaccacgctacggcgtgctactctgcggagagtgcagtctgcgatagtgccccaggaggactgggttaacaaaggcaaaccaacgccccacgcggccctagccccggtaatggtgttaaccagggcgaaaggactagaggttagaggagaccccgcggtttaaagtgcacggcccagcctggctgaagctgtaggtcaggggaaggactagaggttagtggagaccccgtgccacaaaacaccacaacaaaacagcatattgacacctgggatagactaggagatcttctgctctgcacaaccagccacacggcacagtgcgccgacaatggtggctggtggtgcgagaacacaggatct

SEQ ID NO: 32 - protein, 3658 aa, Artificial Sequence
  Synthetic Construct
MSKKPGGPGKSRAVNMLKRGMPRVLSLIGLKRAMVFTLEDFVGDWRQTAGYNLDQVLEQGGVSSLFQNLGVSVTPIQRIVLSGENGLKIDIHVIIPYEGLSGDQMGQIEKIFKVVYPVDDHHFKVILHYGTLVIDGVTPNMIDYFGRPYEGIAVFDGKKITVTGTLWNGNKIIDERLINPDGSLLFRVTINGVTGWRLCERILAGSGEGRGSLLTCGDVEENPGPMSKKPGGPGKSRAVNMLKRGMPRVLSLIGLKRAMLSLIDGKGPIRFVLALLAFFRFTAIAPTRAVLDRWRGVNKQTAMKHLLSFKKELGTLTSAINRRSSKQKKRGGKTGIAVMIGLIASVGAVTLSNFQGKVMMTVNATDVTDVITIPTAAGKNLCIVRAMDVGYMCDDTITYECPVLSAGNDPEDIDCWCTKSAVYVRYGRCTKTRHSRRSRRSLTVQTHGESTLANKKGAWMDSTKATRYLVKTESWILRNPGYALVAAVIGWMLGSNTMQRVVFVVLLLLVAPAYSFNCLGMSNRDFLEGVSGATWVDLVLEGDSCVTIMSKDKPTIDVKMMNMEAANLAEVRSYCYLATVSDLSTKAACPTMGEAHNDKRADPAFVCRQGVVDRGWGNGCGLFGKGSIDTCAKFACSTKAIGRTILKENIKYEVAIFVHGPTTVESHGNYSTQVGATQAGRFSITPAAPSYTLKLGEYGEVTVDCEPRSGIDTNAYYVMTVGTKTFLVHREWFMDLNLPWSSAGSTVWRNRETLMEFEEPHATKQSVIALGSQEGALHQALAGAIPVEFSSNTVKLTSGHLKCRVKMEKLQLKGTTYGVCSKAFKFLGTPADTGHGTVVLELQYTGTDGPCKVPISSVASLNDLTPVGRLVTVNPFVSVATANAKVLIELEPPFGDSYIVVGRGEQQINHHWHKSGSSIGKAFTTTLKGAQRLAALGDTAWDFGSVGGVFTSVGKAVHQVFGGAFRLLFGGMSWITQGLLGALLLWMGINARDRSIALTFLAVGGVLLFLSVNVHADTGCAIDISRQELRCGSGVFIHNDVEAWMDRYKYYPETPQGLAKIIQKAHKEGVCGLRSVSRLEHQMWEAVKDELNTLLKENGVDLSVVVEKQEGMYKSAPKRLTATTEKLEIGWKAWGKSILFAPELANNTFVVDGPETKECPTQNRAWNSLEVEDFGFGLTSTRMFLKVRESNTTECDSKIIGTAVKNNLAIHSDLSYWIESRLNDTWKLERAVLGEVKSCTWPETHTLWGDGILESDLIIPVTLAGPRSNHNRRPGYKTQNQGPWDEGRVEIDFDYCPGTTVTLSESCGHRGPATRTTTESGKLITDWCCRSCTLPPLRYQTDSGCWYGMEIRPQRHDEKTLVQSQVNAYNADMIDPFQLGLLVVFLATQEVLRKRWTAKISMPAILIALLVLVFGGITYTDVLRYVILVGAAFAESNSGGDVVHLALMATFKIQPVFMVASFLKARWTNQENILLMLAAVFFQMAYHDARQILLWEIPDVLNSLAVAWMILRAITFTTTSNVVVPLLALLTPGLRCLNLDVYRILLLMVGIGSLIREKRSAAAKKKGASLLCLALASTGLFNPMILAAGLITCDPNRKRGWPATEVMTAVGLMFAIVGGLAELDIDSMAIPMTIAGLMFAAFVISGKSTDMWIERTADISWESDAEITGSSERVDVRLDDDGNFQLMNDPGAPWKIWMLRMVCLAISAYTPWAILPSVVGFWITLQYTKRGGVLWDTPSPKEYKKGDTTTGVYRIMTRGLLGSYQAGAGVMVEGVFHTLWHTTKGAALMSGEGRLDPYWGSVKEDRLCYGGPWKLQHKWNGQDEVQMIVVEPGKNVKNVQTKPGVFKTPEGEIGAVTLDFPTGTSGSPIVDKNGDVIGLYGNGVIMPNGSYISAIVQGERMDEPIPAGFEPEMLRKKQITVLDLHPGAGKTRRILPQIIKEAINRRLRTAVLAPTRVVAAEMAEALRGLPIRYQTSAVPREHNGNEIVDVMCHATLTHRLMSPHRVPNYNLFVMDEAHFTDPASIAARGYISTKVELGEAAAIFMTATPPGTSDPFPESNSPISDLQTEIPDRAWNSGYEWITEYTGKTVWFVPSVKMGNEIALCLQRAGKKVVQLNRKSYETEYPKCKNDDWDFVITTDISEMGANFKASRVIDSRKSVKPTIITEGEGRVILGEPSAVTAASAAQRRGRIGRNPSQVGDEYCYGGHTNEDDSNFAHWTEARIMLDNINMPNGLIAQFYQPEREKVYTMDGEYRLRGEERKNFLELLRTADLPVWLAYKVAAAGVSYHDRRWCFDGPRTNTILEDNNEVEVITKLGERKILRPRWIDARVYSDHQALKAFKDFASGKRSQIGLIEVLGKMPEHFMGKTWEALDTMYVVATAEKGGRAHRMALEELPDALQTIALIALLSVMTMGVFFLLMQRKGIGKIGLGGAVLGVATFFCWMAEVPGTKIAGMLLLSLLLMIVLIPEPEKQRSQTDNQLAVFLICVMTLVSAVAANEMGWLDKTKSDISSLFGQRIEVKENFSMGEFLLDLRPATAWSLYAVTTAVLTPLLKHLITSDYINTSLTSINVQASALFTLARGFPFVDVGVSALLLAAGCWGQVTLTVTVTAATLLFCHYAYMVPGWQAEAMRSAQRRTAAGIMKNAVVDGIVATDVPELERTTPIMQKKVGQIMLILVSLAAVVVNPSVKTVREAGILITAAAVTLWENGASSVWNATTAIGLCHIMRGGWLSCLSITWTLIKNMEKPGLKRGGAKGRTLGEVWKERLNQMTKEEFTRYRKEAIIEVDRSAAKHARKEGNATGGHPVSRGTAKLRWLVERRFLEPVGKVIDLGCGRGGWCYYMATQKRVQEVRGYTKGGPGHEEPQLVQSYGWNIVTMKSGVDVFYRPSECCDTLLCDIGESSSSAEVEEHRTIRVLEMVEDWLHRGPREFCVKVLCPYMPKVIEKMELLQRRYGGGLVRNPLSRNSTHAMYWVSRASGNVVHSVNMTSQVLLGRMEKRTWKGPQYEEDVNLGSGTRAVGKPLLNSDTSKIKNRIERLRREYSSTWHHDENHPYRTWNYHGSYDVKPTGSASSLVNGVVRLLSKPWDTITNVTTMAMTDTTPFGQQRVFKEKVDTKAPEPPEGVKYVLNETTNWLWAFLAREKRPRMCSREEFIRKVNSNAALGAMFEEQNQWRSAREAVEDPKFWEMVDEEREAHLRGECHTCIYNMMGKREKKPGEFGKAKGSRAIWFMWLGARFLEFEALGFLNEDHWLGRKNSGGGVEGLGLQKLGYILREVGTRPGGKIYADDTAGWDTRITRADLENEAKVLELLDGEHRRLARAIIELTYRHKVVKVMRPAADGRTVMDVISREDQRGSGQVVTYALNTFTNLAVQLVRMMEGEGVIGPDDVEKLTKGKGPKVRTWLFENGEERLSRMAVSGDDCVVKPLDDRFATSLHFLNAMSKVRKDIQEWKPSTGWYDWQQVPFCSNHFTELIMKDGRTLVVPCRGQDELVGRARISPGAGWNVRDTACLAKSYAQMWLLLYFHRRDLRLMANAICSAVPVNWVPTGRTTWSIHAGGEWMTTEDMLEVWNRVWIEENEWMEDKTPVEKWSDVPYSGKREDIWCGSLIGTRARATWAENIQVAINQVRAIIGDEKYVDYMSSLKRYEDTTLVEDTVL
